(19) United States
(12) Patent Application Publication
(10) Pub. No.: US 2022/0162288 A1
(43) Pub. Date: May 26, 2022

(54) CELLULAR THERAPEUTICS ENGINEERED WITH SIGNAL MODULATORS AND METHODS OF USE THEREOF

(71) Applicant: Catamaran Bio, Inc., Cambridge, MA (US)

(72) Inventors: Celeste Richardson, Brookline, MA (US); Luke Barron, Cambridge, MA (US); James Alexander Storer, Medford, MA (US)

(73) Assignee: Catamaran Bio, Inc., Cambridge, MA (US)

(21) Appl. No.: 17/535,071

(22) Filed: Nov. 24, 2021

Related U.S. Application Data
(60) Provisional application No. 63/118,008, filed on Nov. 25, 2020.

(51) Int. Cl. C07K 14/71; A61K 35/17; C07K 14/47

(52) U.S. Cl. CPC C07K 14/71; C07K 2319/03; C07K 14/4705; A61K 35/17

(57) ABSTRACT

The present disclosure is directed to an engineered protein (e.g., a chimeric protein) comprising one or more of an extracellular domain, a transmembrane domain and/or an intracellular domain, which are capable of binding a negative signal and functioning as a sink, dominant negative, or signal inverter for the negative signal. The disclosure is further directed to methods of generating a modified cell expressing one or more of the engineered proteins (e.g., chimeric proteins), and methods of using the modified cells in treating a disease or a condition in a subject in need thereof.

### CROSS-REFERENCE TO RELATED APPLICATIONS

[0001] This application claims priority to U.S. Provisional Patent Application Ser. No. 63/118,008, filed Nov. 25, 2020, the entire contents of which are herein incorporated by reference in its entirety.

### SEQUENCE LISTING

[0002] The instant application contains a Sequence Listing which has been submitted electronically in ASCII format and is hereby incorporated by reference in its entirety. Said ASCII copy, created on Nov. 23, 2021, is named 52526-0018WO1_SL.txt and is 1,026,091 bytes in size.

### FIELD

[0003] The present invention relates generally to the fields of molecular biology, immunology, oncology, cell therapy, and medicine. More particularly, it concerns a cell expressing an engineered protein (e.g., a chimeric protein) comprising one or more of an extracellular domain, a transmembrane domain and/or an intracellular domain.

### BACKGROUND

[0004] Despite expanded appreciation for the diversity of cellular mechanisms fostering solid tumor development, anti-cancer therapy remains heavily reliant on cytotoxic modalities, including chemotherapy and radiation therapy, that kill rapidly proliferating (neoplastic) cells within tumors. Conventional chemotherapy and radiotherapy often produce insufficient benefit, underscoring the need for novel therapeutics. Effective tumor immunotherapy is also hindered by immunological obstacles, such as the ability of tumors to foster a tolerant microenvironment and the activation of a plethora of immunosuppressive mechanisms, which may act in concert to counteract effective immune responses. Genetically engineered immune cells have more recently been used to treat cancer and induce immune responses. The tumor microenvironment is a hostile environment surrounding tumors, which is highly immunosuppressive and a major barrier for cancer therapies to eliminate solid tumors effectively. Immunosuppressive factors, like PD-L1 and TGFβ, produced by the tumor or stromal cells and resident in the tumor microenvironment, suppress the activity of immune cells, thereby limiting the ability of the immune system to act against the invading cancer. Therefore, autologous immune cell therapies are not sufficient for efficiently treating cancers, especially solid cancers.

[0005] There is a need for more effective and safer classes of cell therapies that could treat cancer and induce immune responses in vivo, that also overcome the immunological obstacles of the tumor microenvironment. The present disclosure addresses this unmet need.

### SUMMARY

[0006] The present disclosure relates to engineered proteins (e.g., chimeric proteins) that are capable, when present on a cell, of inhibiting immunosuppressive signals that exist in the tumor microenvironment. The present disclosure further relates to engineered cells, e.g., immune cells such as natural killer (NK) cells, comprising one or more of said engineered proteins (e.g., chimeric proteins), as well as to methods of using the engineered cells for treating a disease or disorder, such as cancer. The engineered proteins (e.g., chimeric proteins) comprise an extracellular domain, a transmembrane domain, and optionally an intracellular domain, and in some embodiments, are chimeric proteins. These proteins, when present on a cell, such as an NK cell, are capable of inhibiting immunosuppressive signals by binding to the negative signaling molecule and acting as a sink or as a dominant negative receptor, thereby neutralizing the negative signal, or acting as a signal inverter to convert the negative signal that would have otherwise been inhibitory into an activating signal, thereby enhancing the anti-tumor activity of the cell.

[0007] The activation of NK cells relies more heavily on, and on a broader repertoire of, signaling-dependent receptors, such as DAP10 and DAP12, in comparison to other types of leukocytes, such as T cells, B cells, monocytes, and macrophages. Therefore, signal inverters (e.g., TGF-βR/DAP10 or TGF-βR/DAP12) that convert negative signals associated with the cell's immunosuppressive activity (e.g., by TGF-βR) to a positive signal, offer a selective advantage to NK cells over other immune cell types. Furthermore, while T cell activation and behavior is highly dependent on TCR engagement, NK cell activation and subsequent target cell killing is, in contrast, determined by a balance of activating and inhibitory signals, and is not as dependent on a single signal. Therefore, while not wishing to be bound by theory, it is believed that incorporating an additional activating signal into NK cells could facilitate a meaningful change in that balance and substantially alter NK cell behavior. It is further postulated that the activating signals provided by, for example, a TGF-βR signal inverter could facilitate intrinsic gains in function of the cell (e.g., NK cell), by preventing antigen escape, by enhancing the expression of endogenous NK activating receptors and/or by promoting a favorable phenotype for anti-tumor activity (e.g., differentiation state) by improving metabolic fitness within the tumor microenvironment. The activating signals provided by, for example, a TGF-βR signal inverter may also facilitate extrinsic gains in function of the cell (e.g., NK cell) by disrupting immunosuppression in the tumor microenvironment, for example, by improving inflammation mediated by chemokines or cytokines, and/or by driving immune activation and epitope spreading with costimulatory ligands or cytokines.

[0008] Also provided herein are chimeric proteins that include an extracellular domain, a transmembrane domain, and an intracellular domain, wherein the extracellular domain is capable of binding a negative signal, and wherein the intracellular domain comprises an intracellular domain, or a portion thereof, of a stimulatory polypeptide.

[0009] In some embodiments, the chimeric protein is capable of activating an immune cell selected from an NK cell, an NKT cell, a T-cell, and a macrophage.

[0010] In some embodiments, the chimeric protein is capable of activating an NK cell.

[0011] In some embodiments, the extracellular domain comprises an antigen-binding domain that specifically binds to the negative signal. In some embodiments, the antigen-binding domain comprises a fragment of an antibody. In some embodiments, the antigen-binding domain comprises an scFv, a Fab, or a VHH. In some embodiments, the scFv is an scFv from a monoclonal antibody. In some embodiments, the scFv is connected to the transmembrane domain by a linker.

[0012] In some embodiments, the antigen-binding domain specifically binds to a negative signal selected from the group consisting of TGF-β, IL-10, IL-1, IL-6, PD-L1, PD-L2, B7-1, B7-2, MHCII, HVEM, CD155, CD112, CD111, CD200, B7-H6, HS-GAG, HLA, N-cadherin, E-cadherin, FasL, and MHCII.

[0013] In some embodiments, the extracellular domain comprises the extracellular domain, or a portion thereof, of an inhibitory polypeptide that binds the negative signal. In some embodiments, the inhibitory polypeptide is an inflammatory mediator receptor, an inhibitory cytokine receptor, an immune checkpoint receptor, or a dual activator-checkpoint receptor.

[0014] In some embodiments, the inhibitory polypeptide is selected from the inhibitory polypeptides presented in Table 1 or Table 1.1.

[0015] In some embodiments, the transmembrane domain comprises the transmembrane domain, or a portion thereof, of an inhibitory polypeptide presented in Table 1 or Table 1.2.

[0016] In some embodiments, the transmembrane domain comprises the transmembrane domain, or a portion thereof, of a stimulatory polypeptide presented in Table 2 or Table 2.2.

[0017] In some embodiments, the intracellular domain comprises the intracellular domain, or a portion thereof, of a stimulatory polypeptide selected from the stimulatory polypeptides presented in Table 2 or Table 2.1. In some embodiments, the stimulatory polypeptide is selected from one or more isoforms of the stimulatory polypeptide.

[0018] In some embodiments, the chimeric protein comprises the intracellular domain, or a portion thereof, of two or more different stimulatory polypeptides.

[0019] In some embodiments, each of the extracellular domain, the transmembrane domain, and the intracellular domain have the same N-terminal to C-terminal orientation.

[0020] In some embodiments, the inhibitory polypeptide is a type I receptor, and the stimulatory polypeptide is a type I receptor; the inhibitory polypeptide is a type I receptor, and the stimulatory polypeptide is a type III receptor; the inhibitory polypeptide is a type II receptor, and the stimulatory polypeptide is a type II receptor; the inhibitory polypeptide is a type I receptor, and the stimulatory polypeptide is not associated with the plasma membrane; or the inhibitory polypeptide is a type I receptor, the stimulatory polypeptide is a type II receptor, and the transmembrane domain, or portion thereof, is from a type I receptor.

[0021] In some embodiments, the inhibitory polypeptide is capable of forming a dimer and the stimulatory polypeptide is capable of forming a dimer; or wherein the inhibitory polypeptide is capable of forming a trimer and the stimulatory polypeptide is capable of forming a trimer.

[0022] In some embodiments, a combination of the extracellular domain, or a portion thereof, of an inhibitory polypeptide and the intracellular domain, or a portion thereof, of a stimulatory polypeptide is selected from the combinations presented in any one of Tables 6-14. 100211 In some embodiments, the extracellular domain and the transmembrane domain are connected by a linker. In some embodiments, the linker is selected from the linkers presented in Table 3.

[0023] In some embodiments, the transmembrane domain and the intracellular domain are connected by a linker. In some embodiments, the linker is selected from the linkers presented in Table 3.

[0024] Also provided herein are modified immune cells engineered to express a chimeric protein comprising an extracellular domain, a transmembrane domain, and an intracellular domain, wherein the extracellular domain is capable of binding a negative signal, and wherein the intracellular domain comprises an intracellular domain, or a portion thereof, of a stimulatory polypeptide.

[0025] In some embodiments, the immune cell is selected from the group consisting of an NK cell, an NKT cell, a T-cell, and a macrophage. In some embodiments, the immune cell is an NK cell.

[0026] In some embodiments, the extracellular domain comprises an antigen-binding domain that specifically binds to the negative signal. In some embodiments, the antigen-binding domain comprises a fragment of an antibody. In some embodiments, the antigen-binding domain comprises an scFv, a Fab, or a VHH. In some embodiments, the scFv is an scFv from a monoclonal antibody. In some embodiments, the scFv is connected to the transmembrane domain by a linker.

[0027] In some embodiments, the antigen-binding domain specifically binds to a negative signal selected from the group consisting of TGF-β, IL-10, IL-1, IL-6, PD-L1, PD-L2, B7-1, B7-2, MHCII, HVEM, CD155, CD112, CD111, CD200, B7-H6, HS-GAG, HLA, N-cadherin, E-cadherin, FasL, and MHCII.

[0028] In some embodiments, the extracellular domain comprises the extracellular domain, or a portion thereof, of an inhibitory polypeptide. In some embodiments, the inhibitory polypeptide is an inflammatory mediator receptor, an inhibitory cytokine receptor, an immune checkpoint receptor, or a dual activator-checkpoint receptor. In some embodiments, the inhibitory polypeptide is selected from the inhibitory polypeptides presented in Table 1 or Table 1.1.

[0029] In some embodiments, the transmembrane domain comprises the transmembrane domain, or a portion thereof, of an inhibitory polypeptide presented in Table 1 or Table 1.2. 100291 In some embodiments, the transmembrane domain comprises the transmembrane domain, or a portion thereof, of a stimulatory polypeptide presented in Table 2 or Table 2.2.

[0030] In some embodiments, the intracellular domain comprises the intracellular domain, or a portion thereof, of a stimulatory polypeptide selected from the stimulatory polypeptides presented in Table 2 or Table 2.1.

[0031] In some embodiments, the chimeric protein comprises the intracellular domain, or a portion thereof, of two or more different stimulatory polypeptides.

[0032] In some embodiments, the extracellular domain and the transmembrane domain are connected with a linker. In some embodiments, the linker is selected from the linkers presented in Table 3.

[0033] In some embodiments, the transmembrane domain and the intracellular domain are connected with a linker. In some embodiments, the linker is selected from the linkers presented in Table 3.

[0034] In some embodiments, the immune cell is engineered to further comprise a chimeric antigen receptor (CAR). In some embodiments, the CAR targets a tumor antigen.

[0035] In some embodiments, the immune cell is engineered to further comprise a cytokine. In some embodiments, the cytokine can be selected from the group consisting of a chemokine, an interferon, an interleukin, a lymphokine, a tumor necrosis factor, or a variant or combination thereof. In some embodiments, the cytokine is an IL-15 or a fragment or variant thereof.

[0036] Also provided herein are chimeric proteins that include an extracellular domain, a transmembrane domain, and an intracellular domain, wherein the extracellular domain binds to TGF-β, and wherein the intracellular domain comprises an intracellular domain, or a portion thereof, of a stimulatory polypeptide.

[0037] In some embodiments, the chimeric protein is capable of activating an immune cell selected from the group consisting of an NK cell, an NKT cell, a T-cell, and a macrophage.

[0038] In some embodiments, the chimeric protein is capable of activating an NK cell.

[0039] In some embodiments, the extracellular domain comprises an antigen-binding domain that specifically binds TGF-β. In some embodiments, the antigen-binding domain comprises a fragment of an antibody. In some embodiments, the antigen-binding domain comprises an scFv, a Fab, or a VHH. In some embodiments, the scFv is an scFv from a monoclonal antibody. In some embodiments, the scFv is connected to the transmembrane domain by a linker.

[0040] In some embodiments, the extracellular domain comprises the extracellular domain, or a portion thereof, of a TGF-β receptor polypeptide.

[0041] In some embodiments, the extracellular domain comprises the extracellular domain, or a portion thereof, of a TGF-βR1 polypeptide or a TGF-βR2 polypeptide presented in Table 1.1.

[0042] In some embodiments, the intracellular domain comprises the intracellular domain, or a portion thereof, of a stimulatory polypeptide selected from the stimulatory polypeptides presented in Table 2 or Table 2.1.

[0043] In some embodiments, the intracellular domain comprises the intracellular domain, or a portion thereof, of two or more different stimulatory polypeptides.

[0044] In some embodiments, the stimulatory polypeptide is selected from the group consisting of DAP10, DAP12, 2B4, CD2, LFA1, IL-21, and PILRB.

[0045] In some embodiments, the stimulatory polypeptide is not one or more of BMP, IL-1, IL-2, IL-7, IL-15, IL-21, IL-12, IL-18, IL-19, IFN-gamma, TLR1, TLR2, TLR3, TLR4, TLR5, TLR6, TLR7, TLR8, TLR9, CD28, 4-1BB, OX40, CD3 (CD3zeta), CD40, CD27, IL-12R, IL-7R, CD137, and ICOS.

[0046] In some embodiments, the stimulatory polypeptide is not DAP12.

[0047] In some embodiments, the extracellular domain further comprises at least a portion of an extracellular domain of the stimulatory polypeptide.

[0048] In some embodiments, the transmembrane domain comprises the transmembrane domain, or a portion thereof, of a stimulatory polypeptide presented in Table 2 or Table 2.2.

[0049] In some embodiments, the transmembrane domain comprises the transmembrane domain, or a portion thereof, of the TGF-β receptor.

[0050] In some embodiments, the transmembrane domain comprises the transmembrane domain, or a portion thereof, of the stimulatory polypeptide.

[0051] In some embodiments, the transmembrane domain and the stimulatory polypeptide are respectively selected from the group consisting of: DAP12 and DAP12; TGF-β R2 and DAP12; 2B4 and 2B4; TGF-β R2 and 2B4; LFA1 and LFA1; TGF-β R2 and LFA1; CD2 and CD2; TGF-β R2 and CD2; CD28 and CD28+CD3zeta; and CD28H and CD28H+CD3zeta.

[0052] In some embodiments, the extracellular domain and transmembrane domain are connected by a linker. In some embodiments, the linker is selected from the linkers presented in Table 3.

[0053] In some embodiments, the transmembrane domain and intracellular domain are connected by a linker. In some embodiments, the linker is selected from the linkers presented in Table 3.

[0054] Also provided herein are modified immune cells engineered to express a chimeric protein comprising an extracellular domain, a transmembrane domain, and an intracellular domain, wherein the extracellular domain binds to TGF-β, and wherein the intracellular domain comprises an intracellular domain, or a portion thereof, of a stimulatory polypeptide.

[0055] In some embodiments, the immune cell is selected from the group consisting of an NK cell, an NKT cell, a T-cell, and a macrophage. In some embodiments, the immune cell is an NK cell.

[0056] In some embodiments, the intracellular domain comprises the intracellular domain, or a portion thereof, of a stimulatory polypeptide that promotes activation of an NK cell.

[0057] In some embodiments, the binding of the extracellular domain to TGF-β activates the immune cell.

[0058] In some embodiments, the extracellular domain comprises an antigen-binding domain that specifically binds TGF-β. In some embodiments, the antigen-binding domain comprises a fragment of an antibody. In some embodiments, the antigen-binding domain comprises an scFv, a Fab, or a VHH. In some embodiments, the scFv is an scFv from a monoclonal antibody.

[0059] In some embodiments, the extracellular domain comprises the extracellular domain, or a portion thereof, of a TGF-β receptor (TGF-BR or TGF-βR) polypeptide.

[0060] In some embodiments, the extracellular domain comprises the extracellular domain, or a portion thereof, of a TGF-βR1 polypeptide or a TGF-βR2 polypeptide presented in Table 1.1.

[0061] In some embodiments, the intracellular domain comprises the intracellular domain, or a portion thereof, of a stimulatory polypeptide selected from the stimulatory polypeptides presented in Table 2 or Table 2.1.

[0062] In some embodiments, the intracellular domain comprises the intracellular domain, or a portion thereof, of two or more different stimulatory polypeptides.

[0063] In some embodiments, the stimulatory polypeptide is DAP10, DAP12, 2B4, CD2, LFA1, IL-21, or PILRB.

[0064] In some embodiments, the stimulatory polypeptide is not one or more of BMP, IL-1, IL-2, IL-7, IL-15, IL-21, IL-12, IL-18, IL-19, IFN-gamma, TLR1, TLR2, TLR3, TLR4, TLR5, TLR6, TLR7, TLR8, TLR9, CD28, 4-1BB, OX40, CD3 (CD3zeta), CD40, CD27, IL-12R, IL-7R, CD137, and ICOS.

[0065] In some embodiments, the stimulatory polypeptide is not DAP12.

[0066] In some embodiments, the transmembrane domain comprises the transmembrane domain, or a portion thereof, of a stimulatory polypeptide presented in Table 2 or Table 2.2.

[0067] In some embodiments, the transmembrane domain comprises the transmembrane domain, or a portion thereof, of the TGF-β receptor (TGF-BR).

[0068] In some embodiments, the transmembrane domain comprises the transmembrane domain, or a portion thereof, of the stimulatory polypeptide.

[0069] In some embodiments, the transmembrane domain and the stimulatory polypeptide are respectively selected from the group consisting of: DAP12 and DAP12; TGF-β R2 and DAP12; 2B4 and 2B4; TGF-β R2 and 2B4; LFA1 and LFA1; TGF-β R2 and LFA1; CD2 and CD2; TGF-β R2 and CD2; CD28 and CD28+CD3zeta; and CD28H and CD28H+CD3zeta.

[0070] In some embodiments, the immune cell is engineered to further comprise a chimeric antigen receptor (CAR). In some embodiments, the CAR targets a tumor antigen.

[0071] In some embodiments, the immune cell is engineered to further comprise a cytokine. In some embodiments, the cytokine can be selected from the group consisting of a chemokine, an interferon, an interleukin, a lymphokine, a tumor necrosis factor, or a variant or combination thereof. In some embodiments, the cytokine is an IL-15 or a fragment or variant thereof.

[0072] Also provided herein are proteins that include an extracellular domain and a transmembrane domain, wherein the extracellular domain is capable of binding a negative signal, and wherein the protein lacks a fully functional intracellular domain.

[0073] In some embodiments, the protein lacks an intracellular domain.

[0074] In some embodiments, the extracellular domain comprises an antigen-binding domain that specifically binds to the negative signal. In some embodiments, the antigen-binding domain comprises a fragment of an antibody. In some embodiments, the antigen-binding domain comprises an scFv, a Fab, or a VHH. In some embodiments, the scFv is an scFv from a monoclonal antibody. In some embodiments, the scFv is connected to the transmembrane domain by a linker.

[0075] In some embodiments, the extracellular domain comprises the extracellular domain, or a portion thereof, of an inhibitory polypeptide that binds to the negative signal. In some embodiments, the inhibitory polypeptide is an inflammatory mediator receptor, an inhibitory cytokine receptor, an immune checkpoint receptor, or a dual activator-checkpoint receptor.

[0076] In some embodiments, the inhibitory polypeptide is selected from the inhibitory polypeptides presented in Table 1 or Table 1.1.

[0077] In some embodiments, the transmembrane domain comprises the transmembrane domain, or a portion thereof, of an inhibitory polypeptide presented in Table 1 or Table 1.2.

[0078] In some embodiments, the transmembrane domain comprises the transmembrane domain, or a portion thereof, of a stimulatory polypeptide presented in Table 2 or Table 2.2.

[0079] In some embodiments, the extracellular domain and the transmembrane domain are connected by a linker. In some embodiments, the linker is selected from the linkers presented in Table 3.

[0080] In some embodiments, the transmembrane domain comprises the transmembrane domain, or a portion thereof, of a different polypeptide than the extracellular domain. In some embodiments, the different polypeptide is selected from the inhibitory polypeptides presented in Table 1 or Table 1.2; or the stimulatory polypeptides presented in Table 2 or Table 2.2.

[0081] Also provided herein are modified cells engineered to express a protein comprising an extracellular domain and a transmembrane domain, wherein the extracellular domain is capable of binding a negative signal, and wherein the chimeric protein lacks a fully functional intracellular domain.

[0082] In some embodiments, the cell is selected from the group consisting of an artificial cell, an immune cell, a fibrocyte, a mesenchymal stem cell, an induced neural stem cell, or an induced pluripotent stem cell (iPSC)-derived cell, and an erythrocyte. In some embodiments, the immune cell is selected from the group consisting of a T cell, an NK cell, an NKT cell (e.g., an invariant NKT (iNKT) cell), a type 1 innate lymphoid cell (ILC1), an intraepithelial type 1 innate lymphoid cell (ieILC1), a type 2 innate lymphoid cell (ILC2), a type 3 innate lymphoid cell (ILC3), a lymphoid tissue inducer cell (LTi), a monocyte, a macrophage, a dendritic cell (DC), a platelet, a marrow-infiltrating lymphocyte (MIL), and a B cell. In some embodiments, the immune cell is an NK cell.

[0083] In some embodiments, the chimeric protein lacks an intracellular domain.

[0084] In some embodiments, the extracellular domain comprises an antigen-binding domain that specifically binds to the negative signal. In some embodiments, the antigen-binding domain comprises a fragment of an antibody. In some embodiments, the antigen-binding domain comprises an scFv, a Fab, or a VHH. In some embodiments, the scFv is an scFv from a monoclonal antibody. In some embodiments, the extracellular domain does not comprise an antigen-binding domain (e.g., an antibody or a fragment thereof, scFv, Fab, and a VHH).

[0085] In some embodiments, the extracellular domain comprises the extracellular domain, or a portion thereof, of an inhibitory polypeptide that binds to the negative signal. In some embodiments, the inhibitory polypeptide is an inflammatory mediator receptor, an inhibitory cytokine receptor, an immune checkpoint receptor, or a dual activator-checkpoint receptor.

[0086] In some embodiments, the inhibitory polypeptide is selected from the inhibitory polypeptides presented in Table 1 or Table 1.1.

[0087] In some embodiments, the transmembrane domain comprises the transmembrane domain, or a portion thereof, of an inhibitory polypeptide presented in Table 1 or Table 1.2.

[0088] In some embodiments, the transmembrane domain comprises the transmembrane domain, or a portion thereof, of a stimulatory polypeptide presented in Table 2 or Table 2.2.

[0089] In some embodiments, the extracellular domain and the transmembrane domain are connected by a linker. In some embodiments, the linker is selected from the linkers presented in Table 3.

[0090] In some embodiments, the immune cell is engineered to further comprise a chimeric antigen receptor (CAR). In some embodiments, the CAR targets a tumor antigen.

[0091] In some embodiments, the immune cell is engineered to further comprise a cytokine. In some embodiments, the cytokine can be selected from the group consisting of a chemokine, an interferon, an interleukin, a lymphokine, a tumor necrosis factor, or a variant or combination thereof. In some embodiments, the cytokine is an IL-15 or a fragment or variant thereof.

[0092] Also provided herein are modified cells engineered to express a protein comprising a dominant negative isoform of a protein, wherein the dominant negative isoform of the protein competes with a wild-type isoform of the protein for binding a negative signal.

[0093] In some embodiments, the cell is selected from the group consisting of an artificial cell, an immune cell, a fibrocyte, a mesenchymal stem cell, an induced neural stem cell, and an induced pluripotent stem cell (iPSC)-derived cell, and an erythrocyte. In some embodiments, the immune cell is a tumor infiltrating lymphocyte (TIL). In some embodiments, the immune cell is selected from the group consisting of a T cell, an NK cell, an NKT cell, a type 1 innate lymphoid cell (ILC1), an intraepithelial type 1 innate lymphoid cell (ieILC1), a type 2 innate lymphoid cell (ILC2), a type 3 innate lymphoid cell (ILC3), a lymphoid tissue inducer cell (LTi), a monocyte, a macrophage, a dendritic cell (DC), a platelet, a marrow-infiltrating lymphocyte (MIL), and a B cell. In some embodiments, the immune cell is an NK cell.

[0094] In some embodiments, the dominant negative isoform of the protein is a dominant negative isoform of an inhibitory polypeptide selected from Table 1 or Table 1.1.

[0095] In some embodiments, the dominant negative isoform of the protein is a dominant negative isoform of TGF-BR1. In some embodiments, the dominant negative isoform of TGF-BR1 is selected from the dominant negative isoforms of TGF-BR1 presented in Table 4.

[0096] In some embodiments, the immune cells comprising a CAR described herein are T cells (e.g., alpha beta T cells and gamma delta T cells). In some embodiments, the T cells are one or more of CD3⁺, CD28⁺, CD4⁺, CD8⁺, CD45RA⁺, CD25⁺ and CD45RO⁺. In some embodiments, the T cells are isolated tumor infiltrating lymphocytes (TIL). In some embodiments, the T cells are CD4⁺ T cells. In some embodiments, the T cells are CD8⁺ T cells. In some embodiments, the T cells are regulatory T cell (e.g., a CD4⁺, CD25⁺, CD62L^{hi}, GITR⁺ and FoxP3⁺ T cells). In some embodiments, the T cells are memory T cells (T_{CM}) (e.g., CD62L⁺, CCR7⁺, CD45RO⁻ and CD45RA⁻). In some embodiments, the T cells are stem cell memory T cells. In some embodiments, the T cells are naïve T cells. In some embodiments, the T cells are a mixed population of CD4⁺ T cells, CD8⁺ T cells, stem cell memory T cells and naïve T cells. In some embodiments, the immune cells comprising a protein described herein (e.g., a CAR) are natural killer T (NKT) cells. NKT cells recognize glycolipid antigen presented by a molecule called CD1d.

[0097] In some embodiments, the dominant negative isoform of the protein is a dominant negative isoform of TGF-BR2. In some embodiments, the dominant negative isoform of TGF-BR2 is selected from the dominant negative isoforms of TGF-BR2 presented in Table 5.

[0098] In some embodiments, the immune cell is engineered to further comprise a chimeric antigen receptor (CAR). In some embodiments, the CAR targets a tumor antigen. In some embodiments, the immune cell is engineered to further comprise a cytokine. In some embodiments, the cytokine can be selected from the group consisting of a chemokine, an interferon, an interleukin, a lymphokine, a tumor necrosis factor, or a variant or combination thereof. In some embodiments, the cytokine is an IL-15 or a fragment or variant thereof.

[0099] Also provided herein are modified cells engineered to express at least two proteins selected from the group consisting of: (a) a chimeric protein comprising an extracellular domain, a transmembrane domain, and an intracellular domain, wherein the extracellular domain is capable of binding a negative signal, and wherein the intracellular domain comprises an intracellular domain, or a portion thereof, of a stimulatory polypeptide; (b) a protein comprising a dominant negative isoform of a protein, wherein the dominant negative isoform of the protein competes with a wild-type isoform of the protein for binding a negative signal that prevents or decreases the activation of an immune response; and (c) a protein comprising an extracellular domain and a transmembrane domain, wherein the extracellular domain is capable of binding a negative signal, and wherein the protein lacks a fully functional intracellular domain.

[0100] In some embodiments, the cell is selected from the group consisting of an artificial cell, an immune cell, a fibrocyte, a mesenchymal stem cell, an induced neural stem cell, and an induced pluripotent stem cell (iPSC)-derived cell. In some embodiments, the immune cell is selected from the group consisting of a T cell, an NK cell, an NKT cell, a type 1 innate lymphoid cell (ILC1), an intraepithelial type 1 innate lymphoid cell (ieILC1), a type 2 innate lymphoid cell (ILC2), a type 3 innate lymphoid cell (ILC3), a lymphoid tissue inducer cell (LTi), a monocyte, a macrophage, a dendritic cell (DC), a platelet, a marrow-infiltrating lymphocyte (MIL), and a B cell. In some embodiments, the immune cell is a tumor infiltrating lymphocyte (TIL). In some embodiments, the immune cell is an NK cell.

[0101] Also provided herein are polynucleotides that include a nucleic acid sequence encoding any of the chimeric proteins, or engineered proteins (e.g., chimeric proteins) described herein.

[0102] Also provided herein are pharmaceutical compositions that include any of the modified cells described herein, and a pharmaceutically acceptable excipient.

[0103] Also provided herein are methods of treating a subject in need of an altered immune response that include administering to the subject an effective amount of a composition comprising any of the modified cells described herein, thereby treating the subject in need of the altered immune response.

[0104] Also provided herein are methods of treating a disease or pathological condition in a subject that include administering to the subject an effective amount of a composition comprising any of the modified cell described herein, thereby treating the disease or pathological condition in the subject.

[0105] Also provided herein are methods of treating a cancer in a subject that include administering to the subject a therapeutically effective amount of a composition comprising any of the modified cells described herein, thereby treating the cancer in the subject.

[0106] Also provided herein are methods of generating any of the modified cells described herein that include: (a) introducing a nucleic acid encoding any of the chimeric proteins or engineered proteins (e.g., chimeric proteins) described herein, into a cell; (b) culturing the cell under conditions allowing the expression of the protein in or on the cell; and (c) recovering the cell from the culture, thereby generating the modified cell.

[0107] Also provided herein are cells obtained by the methods described herein.

[0108] Also provided herein are kits that include any of the chimeric proteins or any of the engineered proteins (e.g., chimeric proteins) described herein, any of the modified cells described herein, and/or any of the nucleic acids encoding any of the chimeric proteins or the engineered proteins described herein.

### BRIEF DESCRIPTION OF THE DRAWINGS

[0109] FIG. 1 is a general schematic of the sink, dominant negative, and signal inverter modalities of the disclosure.

[0110] FIG. 2 is a schematic of an exemplary protein of the sink modality of the disclosure.

[0111] FIG. 3 is a schematic of an exemplary protein of the dominant negative receptor modality of the disclosure.

[0112] FIG. 4 is a schematic of an exemplary chimeric protein of the signal inverter modality of the disclosure.

[0113] FIG. 5 is a graph showing that stimulation of reporter cells expressing different chimeric proteins including the extracellular domains of inhibitory receptors induces NF-κB activation.

[0114] FIG. 6 is a graph showing that stimulation of reporter cells expressing different chimeric proteins including the extracellular domains of inhibitory receptors induces CD69 expression.

[0115] FIG. 7A is a graph showing that TGF-B1 stimulation of reporter cells expressing different chimeric proteins including the extracellular domain of TGF-BR2 induces NF-κB activation.

[0116] FIG. 7B is a graph showing that TGF-B1 stimulation of reporter cells expressing different chimeric proteins including the extracellular domain of TGF-BR2 induces CD69 expression.

[0117] FIG. 8 is a graph showing the fold expansion of NK cells expressing chimeric proteins including the extracellular domain of TGF-BR2.

[0118] FIG. 9 is a graph showing interferon gamma cytokine production in NK cells expressing different chimeric proteins including the extracellular domain of TGF-BR2.

[0119] FIG. 10 is a graph showing IP-10 production in NK cells expressing different chimeric proteins including the extracellular domain of TGF-BR2.

[0120] FIG. 11 is a graph showing the cytotoxicity against SKOV-3 target cells by NK cells expressing different chimeric proteins including the extracellular domain of TGF-BR2.

### DETAILED DESCRIPTION

[0121] The present disclosure overcomes problems associated with current technologies by providing engineered cells (e.g., immune cells, such as NK cells) for cell-based therapies, such as adoptive immunotherapy, for the treatment of diseases including cancer.

[0122] In some embodiments, provided herein are modified immune cells engineered to express a chimeric protein, where contacting the modified immune cells with a negative signal that binds to the extracellular domain of the chimeric protein results in the increased activation of nuclear factor kappa B (NF-κB) activity, activator protein 1 (AP-1) activity, nuclear factor of activated T-cells (NFAT) activity, and a signal transducer and activator of transcription protein (STAT; e.g., STAT1, STAT3, STAT4, STAT5, and/or STAT6) activity in the cell, e.g., as compared to a wildtype immune cell or a modified immune cell not contacted with the negative signal. In some embodiments, the modified immune cells engineered to express a chimeric protein, where expression of the chimeric protein results in the increased activation of NF-κB activity, AP-1 activity, NFAT activity, and STAT (e.g., STAT1, STAT3, STAT4, STAT5, and/or STAT6) activity in the cell, e.g., as compared to a wildtype immune cell.

[0123] In some embodiments, provided herein are modified immune cells engineered to express a chimeric protein, where contacting the modified immune cells with a negative signal that binds to the extracellular domain of the chimeric protein results in increased production levels and/or secretion levels of (e.g., at least a 0.1-fold, at least a 1-fold, at least a 5-fold, at least a 10-fold, at least a 20-fold, at least a 30-fold, at least a 40-fold, at least a 50-fold, at least a 60-fold, at least a 80-fold, or at least a 100-fold increase, or about a 0.1-fold to about a 100-fold, about a 0.1-fold to about a 80-fold, about a 0.1-fold to about a 60-fold, about a 0.1-fold to about a 50-fold, about a 0.1-fold to about a 40-fold, about a 0.1-fold to about a 30-fold, about a 0.1-fold to about a 20-fold, about a 0.1-fold to about a 10-fold, about a 0.1-fold to about a 5-fold, about a 1-fold to about a 100-fold, about a 1-fold to about a 80-fold, about a 1-fold to about a 60-fold, about a 1-fold to about a 50-fold, about a 1-fold to about a 40-fold, about a 1-fold to about a 30-fold, about a 1-fold to about a 20-fold, about a 1-fold to about a 10-fold, about a 1-fold to about a 5-fold, about a 5-fold to about a 100-fold, about a 5-fold to about a 80-fold, about a 5-fold to about a 60-fold, about a 5-fold to about a 50-fold, about a 5-fold to about a 40-fold, about a 5-fold to about a 30-fold, about a 5-fold to about a 20-fold, about a 5-fold to about a 10-fold, about a 10-fold to about a 100-fold, about a 10-fold to about a 80-fold, about a 10-fold to about a 60-fold, about a 10-fold to about a 50-fold, about a 10-fold to about a 40-fold, about a 10-fold to about a 30-fold, about a 10-fold to about a 20-fold, about a 20-fold to about a 100-fold, about a 20-fold to about a 80-fold, about a 20-fold to about a 60-fold, about a 20-fold to about a 50-fold, about a 20-fold to about a 40-fold, about a 20-fold to about a 30-fold, about a 30-fold to about a 100-fold, about a 30-fold to about a 80-fold, about a 30-fold to about a 60-fold, about a 30-fold to about a 50-fold, about a 30-fold to about a 40-fold, about a 40-fold to about a 100-fold, about a 40-fold to about a 80-fold, about a 40-fold to about a 60-fold, about a 40-fold to about a 50-fold, about a 50-fold to about a 100-fold, about a 50-fold to about a 80-fold, about a 50-fold to about a 60-fold, about a 60-fold to about a 100-fold, about a 60-fold to about a 80-fold, or about a 80-fold to about a 100-fold)) of one or more (e.g., two, three, four, five, six, or seven) cytokines selected from the group of interferon-gamma, IL-10, TNF-alpha, IL-8, IP-10, MCP-1, MIP-1a, and MIP-1b and/or CD69 expression by the cells, e.g., as compared to a wildtype immune cell or a modified immune cell not contacted with the negative signal. In some embodiments, the modified immune cells engineered to express a chimeric protein, where expression of the chimeric protein results in the increased production levels and/or secretion levels (e.g., at least a 0.1-fold, at least a 1-fold, at least a 5-fold, at least a 10-fold, at least a 20-fold, at least a 30-fold, at least a 40-fold, at least a 50-fold, at least a 60-fold, at least a 80-fold, or at least a 100-fold increase, or about a 0.1-fold to about a 100-fold (or any of the subranges of this range described herein)) of one or more (e.g., two, three, four, five, six, or seven) cytokines selected from the group of interferon-gamma, IL-10, TNF-alpha, IL-8, IP-10, MCP-1, MIP-1a, and MIP-1b and/or CD69 expression by the cells (e.g., in the absence of a negative signal that binds to the extracellular domain of the chimeric protein), e.g., as compared to a wildtype immune cell.

[0124] In some embodiments, provided herein are modified immune cells engineered to express a chimeric protein, where contacting the modified immune cells with a negative signal that binds to the extracellular domain of the chimeric protein results in an increased level (e.g., at least a 0.1-fold, at least a 1-fold, at least a 5-fold, at least a 10-fold, at least a 20-fold, at least a 30-fold, at least a 40-fold, at least a 50-fold, at least a 60-fold, at least a 80-fold, or at least a 100-fold increase, or about a 0.1-fold to about a 100-fold (or any of the subranges of this range described herein)) of cytotoxicity (e.g., percent killing) against target cells (e.g., target cancer cells) by the modified immune cell, e.g., as compared to a wildtype immune cell or a modified immune cell not contacted with the negative signal. In some embodiments, the modified immune cells engineered to express a chimeric protein, where expression of the chimeric protein results in an increased level (e.g., at least a 0.1-fold, at least a 1-fold, at least a 5-fold, at least a 10-fold, at least a 20-fold, at least a 30-fold, at least a 40-fold, at least a 50-fold, at least a 60-fold, at least a 80-fold, or at least a 100-fold increase, or about a 0.1-fold to about a 100-fold (or any of the subranges of this range described herein)) of cytotoxicity (e.g., percent killing) against target cells (e.g., target cancer cells) by the modified immune cells (e.g., in the absence of a negative signal that binds to the extracellular domain of the chimeric protein), e.g., as compared to a wildtype immune cell.

[0125] In some embodiments, provided herein are modified immune cells engineered to express a chimeric protein, where contacting the modified immune cells with a negative signal that binds to the extracellular domain of the chimeric protein results in increased proliferation (e.g., expansion) and/or survival of the cells (e.g., in vivo or in vitro) e.g., as compared to a wildtype immune cell or a modified immune cell not contacted with the negative signal. In some embodiments, the modified immune cells engineered to express a chimeric protein, where expression of the chimeric protein results in increase proliferation (e.g., expansion) and/or survival of the cells (e.g., in vivo or in vitro) (e.g., in the absence of a negative signal that binds to the extracellular domain of the chimeric protein), e.g., as compared to a wildtype immune cell or a modified immune cell not contacted with the negative signal.

[0126] In some embodiments, provided herein are modified immune cells engineered to express a chimeric protein, where expression of the chimeric protein results in an increase (e.g., at least a 0.1-fold, at least a 1-fold, at least a 5-fold, at least a 10-fold, at least a 20-fold, at least a 30-fold, at least a 40-fold, at least a 50-fold, at least a 60-fold, at least a 80-fold, or at least a 100-fold increase, or about a 0.1-fold to about a 100-fold (or any of the subranges of this range described herein)) in the expansion (e.g., in vivo or in vitro) of the immune cell in the presence of a negative signal, e.g., as compared to a wildtype immune cell or the modified immune cell in the absence of the negative signal. In some embodiments, provided herein are modified immune cells engineered to express a chimeric protein, where expression of the chimeric protein results in an increase (e.g., at least a 0.1-fold, at least a 1-fold, at least a 5-fold, at least a 10-fold, at least a 20-fold, at least a 30-fold, at least a 40-fold, at least a 50-fold, at least a 60-fold, at least a 80-fold, or at least a 100-fold increase, or about a 0.1-fold to about a 100-fold (or any of the subranges of this range described herein)) in the expansion (e.g., in vivo or in vitro) of the immune cell (e.g., in the absence of a negative signal that binds to the extracellular domain of the chimeric protein), e.g., as compared to a wildtype immune cell.

[0127] In some embodiments, provided herein are modified immune cells engineered to express a chimeric protein, where expression of the chimeric protein results in an increase (e.g., at least a 0.1-fold, at least a 1-fold, at least a 5-fold, at least a 10-fold, at least a 20-fold, at least a 30-fold, at least a 40-fold, at least a 50-fold, at least a 60-fold, at least a 80-fold, or at least a 100-fold increase, or about a 0.1-fold to about a 100-fold (or any of the subranges of this range described herein)) in the proliferation (e.g., in vivo or in vitro) of the immune cell in the presence of a negative signal, e.g., as compared to a wildtype immune cell or the modified immune cell in the absence of the negative signal. In some embodiments, provided herein are modified immune cells engineered to express a chimeric protein, where expression of the chimeric protein results in an increase (e.g., at least a 0.1-fold, at least a 1-fold, at least a 5-fold, at least a 10-fold, at least a 20-fold, at least a 30-fold, at least a 40-fold, at least a 50-fold, at least a 60-fold, at least a 80-fold, or at least a 100-fold increase, or about a 0.1-fold to about a 100-fold (or any of the subranges of this range described herein)) in the proliferation (e.g., in vivo or in vitro) of the immune cell (e.g., in the absence of a negative signal that binds to the extracellular domain of the chimeric protein), e.g., as compared to a wildtype immune cell.

### I. Definitions

[0128] As used in this specification and the appended claims, the singular forms “a”, “an” and “the” include plural references unless the content clearly dictates otherwise.

[0129] The use of the alternative (e.g., “or”) should be understood to mean either one, both, or any combination thereof of the alternatives.

[0130] As used herein, the term “about,” when referring to a measurable value such as an amount, a temporal duration, and the like, is meant to encompass variations of 20% or 10%, more preferably ±5%, even more preferably ±1%, and still more preferably ±0.1% from the specified value, as such variations are appropriate to perform the disclosed methods.

[0131] As used herein, any concentration range, percentage range, ratio range, or integer range is to be understood to include the value of any integer within the recited range and, when appropriate, fractions thereof (such as one tenth and one hundredth of an integer), unless otherwise indicated.

[0132] As used herein, “comprise,” “comprising,” “comprises,” and “comprised of” are meant to be synonymous with “include,” “including,” “includes,” “contain,” “containing,” or “contains” and are inclusive or open-ended terms that specify the presence of what follows, e.g., component, and do not exclude or preclude the presence of additional, non-recited components, features, element, members, steps, known in the art or disclosed therein.

[0133] As used herein, the terms “such as,” “for example,” and the like are intended to refer to exemplary embodiments and not to limit the scope of the present disclosure.

[0134] Unless defined otherwise, all technical and scientific terms used herein have the same meaning as commonly understood by one of ordinary skill in the art to which the disclosure pertains. Although any methods and materials similar or equivalent to those described herein can be used in the practice for testing of embodiments of the present disclosure, preferred materials and methods are described herein.

[0135] As used herein, the term “chimeric protein” refers to any single polypeptide unit that comprises at least two distinct polypeptide domains, wherein the two domains are not naturally occurring within the same polypeptide unit. Typically, such chimeric proteins are made by expression of a cDNA construct, but could be made by protein synthesis methods known in the art. A domain, for example, can be a contiguous primary amino acid sequence in a protein.

[0136] The terms “polypeptide” and “protein” are used interchangeably herein.

[0137] As used herein, the term “chimeric antigen receptor” or “CAR” refers to engineered receptors (e.g., chimeric receptors), which graft a specificity (e.g., a selected specificity) onto a cell. CARs typically comprise an extracellular domain (which comprises an antigen-binding domain), a transmembrane domain, and an intracellular domain.

[0138] The term “exogenous,” when used in relation to a protein, gene, nucleic acid, or polynucleotide in a cell or organism, refers to a protein, gene, nucleic acid, or polynucleotide that has been introduced into the cell or organism by artificial or natural means; or in relation to a cell, the term refers to a cell that was isolated and subsequently introduced to other cells or to an organism by artificial or natural means. An exogenous nucleic acid may be from a different organism or cell, or it may be one or more additional copies of a nucleic acid that occurs naturally within the organism or cell. An exogenous cell may be from a different organism, or it may be from the same organism. By way of a non-limiting example, an exogenous nucleic acid is one that is in a chromosomal location different from where it would be in natural cells (e.g., a wild-type cell) or is otherwise flanked by a different nucleic acid sequence than that found in nature.

[0139] As used herein, the term “expression construct” or “expression cassette” is used to mean a nucleic acid molecule that is capable of directing transcription. An expression construct includes, at a minimum, one or more transcriptional control elements (such as promoters, enhancers, or a structure functionally equivalent thereof) that direct gene expression in one or more desired cell types, tissues, or organs. Additional elements, such as a transcription termination signal, may also be included.

[0140] As used herein, the term “extracellular domain” refers to the fragment or portion of a receptor or protein that is generally present on the outside of a cell (e.g., following cellular processing). In some embodiments, the extracellular domain of a receptor or polypeptide includes a ligand binding or recognition domain. The extracellular domain of a receptor may be identified, for example, using databases known in the art, e.g., UNIPROT.

[0141] As used herein, the term “intracellular domain” refers to the fragment or portion of a receptor or protein that is generally present on the inside (e.g., the cytoplasm) of a cell and mediates activation of at least one effector function. The term “effector function” refers to a specialized function of a cell. Effector function of an NK cell, for example, may be its cytolytic activity including the secretion of cytokines. Effector function of a T cell, for example, may be cytolytic activity or helper activity including the secretion of cytokines. Thus, the term intracellular domain refers to the portion of a protein which transduces the effector function signal and directs the cell to perform a specialized function. The intracellular domain of a signaling receptor may include a signaling domain, a protein interaction domain, an enzymatic domain, or a combination thereof. While the entire intracellular domain of a source protein can be employed, in some embodiments, it is not necessary to use the entire chain of the intracellular domain of a source protein. To the extent that a truncated portion of a source protein intracellular domain is used, such truncated portion may be used in place of the intact chain as long as it transduces the effector function signal. The term intracellular domain is thus meant to include any truncated portion of the source protein intracellular domain sufficient to transduce the effector function signal. The intracellular domain of a source protein (e.g, a receptor) may be identified, for example, by databases known in the art, e.g., UNIPROT.

[0142] As used herein, the term “transmembrane domain” refers to a domain that anchors a polypeptide to the plasma membrane of a cell. The transmembrane domain may be derived either from a natural, synthetic, semi-synthetic, or recombinant sources. In some embodiments, the transmembrane domain of a chimeric protein is a transmembrane domain of an inhibitory polypeptide, or a portion thereof (e.g., any of the inhibitory polypeptides described herein). In some embodiments, the transmembrane domain is a transmembrane domain of a stimulatory polypeptide, or a portion thereof (e.g., any of the stimulatory polypeptides described herein). The transmembrane domain of a polypeptide may be identified, for example, by databases known in the art, e.g., UNIPROT. In some embodiments, the transmembrane domain comprises up to 5, up to 10, or up to 15 amino acids of the intracellular domain. In some embodiments, the transmembrane domain comprises a charged amino acid residue at the terminus oriented towards the cytoplasm.

[0143] As used herein, the term “vector” or “construct” (sometimes referred to as a gene delivery system or gene transfer “vehicle”) refers to a macromolecule or complex of molecules comprising a polynucleotide to be delivered to a host cell, either in vitro or in vivo. In some embodiments, a construct refers to a polypeptide construct (e.g., a chimeric protein) that is is not a gene delivery system or gene transfer vehicle.

[0144] By “operably linked” or “co-expressed” with reference to nucleic acid molecules is meant that two or more nucleic acid molecules (e.g., a nucleic acid molecule to be transcribed, a promoter, and a CAR) are connected in such a way as to permit transcription of the nucleic acid molecule. “Operably linked” or “co-expressed” with reference to peptide and/or polypeptide molecules means that two or more peptide and/or polypeptide molecules are connected in such a way as to yield a single polypeptide chain, i.e., a fusion polypeptide, having at least one property of each peptide and/or polypeptide component of the fusion. The fusion polypeptide is preferably chimeric, i.e., composed of heterologous molecules.

[0145] The term “homology” refers to the percent of identity between two polynucleotides or two polypeptides. The correspondence between one sequence and another can be determined by techniques known in the art. For example, homology can be determined by a direct comparison of the sequence information between two polypeptide molecules by aligning the sequence information and using readily available computer programs. Alternatively, homology can be determined by hybridization of polynucleotides under conditions that promote the formation of stable duplexes between homologous regions, followed by digestion with single strand-specific nuclease(s), and size determination of the digested fragments. Two DNA, or two polypeptide, sequences are “substantially homologous” to each other when at least about 80%, preferably at least about 90%, and most preferably at least about 95% of the nucleotides, or amino acids, respectively match over a defined length of the molecules, as determined using the methods above.

[0146] The term “stem cell” refers herein to a cell that under suitable conditions is capable of differentiating into a diverse range of specialized cell types, while under other suitable conditions is capable of self-renewing and remaining in an essentially undifferentiated pluripotent state. The term “stem cell” also encompasses a pluripotent cell, multipotent cell, precursor cell, and progenitor cell. Exemplary human stem cells can be obtained from hematopoietic or mesenchymal stem cells obtained from bone marrow tissue, embryonic stem cells obtained from embryonic tissue, or embryonic germ cells obtained from genital tissue of a fetus. Exemplary pluripotent stem cells can also be produced from somatic cells by reprogramming them to a pluripotent state by the expression of certain transcription factors associated with pluripotency: these cells are called “induced pluripotent stem cells” or “iPScs,” “iPSCs,” or “iPS cells.”

[0147] An “embryonic stem (ES) cell” is an undifferentiated pluripotent cell which is obtained from an embryo in an early stage, such as the inner cell mass at the blastocyst stage, or produced by artificial means (e.g., nuclear transfer) and can give rise to any differentiated cell type in an embryo or an adult.

[0148] As used herein, the term “immune response” refers to a process that results in the activation and/or invocation of an effector function in either T cells, B cells, natural killer (NK) cells, and/or antigen-presenting cells. Thus, an immune response, as would be understood by the skilled artisan, includes, but is not limited to, any detectable activation of an NK cell, helper T cell, or cytotoxic T cell response, production of antibodies, T cell-mediated activation of allergic reactions, and the like.

[0149] Immune response may also refer to any particular measurable aspect of an immune response, including, but not limited to, cytokine secretion (IL-6, IL-10, IFN-γ, etc.), chemokine secretion, altered migration or cell accumulation, immunoglobulin production, dendritic cell maturation, regulatory activity, number of immune cells and proliferation of any cell of the immune system. Another parameter of an immune response is structural damage or functional deterioration of any organ resulting from immunological attack. One of skill in the art can readily determine an increase in any one of these parameters, using known laboratory assays. In one specific non-limiting example, to assess cell proliferation, incorporation of ³H-thymidine can be assessed. A “substantial” increase in a parameter of the immune response is a significant increase in this parameter as compared to a control. Specific, non-limiting examples of a substantial increase are at least about a 10% increase, at least about a 20% increase, at least about a 30% increase, at least about a 40% increase, at least about a 50% increase, at least about a 75% increase, at least about a 90% increase, at least about a 100% increase, at least about a 200% increase, at least about a 300% increase, or at least about a 500% increase. Similarly, an inhibition or decrease in a parameter of the immune response is a significant decrease in this parameter as compared to a control. Specific, non-limiting examples of a substantial decrease are at least about a 10% decrease, at least about a 20% decrease, at least about a 30% decrease, at least about a 40% decrease, at least about a 50% decrease, at least about a 75% decrease, at least about a 90% decrease, or at least about a 99% decrease. A statistical test, such as a non-parametric ANOVA, or a T-test, can be used to compare differences in the magnitude of the response induced by one agent as compared to the percent of samples that respond using a second agent. In some examples, p≤0.05 is significant, and indicates that the chance that an increase or decrease in any observed parameter is due to random variation is less than 5%. One of skill in the art can readily identify other statistical assays of use.

[0150] As used herein, the term “immune cell” refers to any cell involved in the mounting of an immune response. Such cells include, but are not limited to, T cells, B cells, NK cells, NKT cells, antigen-presenting cells, macrophages, and the like.

[0151] “Induced pluripotent stem cells” (“iPScs,” “iPSCs,” or “iPS cells”) are cells generated by reprogramming a somatic cell by expressing or inducing expression of a combination of factors (herein referred to as reprogramming factors). iPS cells can be generated using fetal, postnatal, newborn, juvenile, or adult somatic cells. In certain embodiments, factors that can be used to reprogram somatic cells to pluripotent stem cells include, for example, Oct4 (sometimes referred to as Oct 3/4), Sox2, c-Myc, Klf4, Nanog, and Lin28. In some embodiments, somatic cells are reprogrammed by expressing at least two reprogramming factors, at least three reprogramming factors, at least four reprogramming factors, at least five reprogramming factors, at least six reprogramming factors, or at least seven reprogramming factors to reprogram a somatic cell to a pluripotent stem cell.

[0152] “Hematopoietic progenitor cells” or “hematopoietic precursor cells” refers to cells which are committed to a hematopoietic lineage but are capable of further hematopoietic differentiation and include hematopoietic stem cells, multipotential hematopoietic stem cells, common myeloid progenitors, megakaryocyte progenitors, erythrocyte progenitors, and lymphoid progenitors. Hematopoietic stem cells (HSCs) are multipotent stem cells that give rise to all the blood cell types including myeloid (monocytes and macrophages, granulocytes (neutrophils, basophils, eosinophils, and mast cells), erythrocytes, megakaryocytes/platelets, dendritic cells), and lymphoid lineages (T cells, B cells, NK cells).

[0153] As used herein, the term “membrane receptor” refers to any receptor found on the surface of a cell, e.g., an immune cell. The membrane receptor may include receptors for hormones, cytokines, growth factors, cell recognition molecules, or other signaling receptors. Examples of membrane receptors include but are not limited to those listed in Table 1.

[0154] As used herein, the term “modulating an immune response” refers to mediating a detectable increase or decrease in the level of an immune response in a mammal compared with the level of an immune response in the mammal in the absence of a treatment or compound, and/or compared with the level of an immune response in an otherwise identical but untreated mammal. The term encompasses perturbing and/or affecting a native signal or response thereby mediating a beneficial therapeutic response in a mammal, preferably, a human.

[0155] As used herein, the term “negative signal” or “inhibitory signal” refers to a signal, i.e., signaling molecule, that induces the typical cascade of intracellular events associated with among other things, decreased proliferation, decreased activation, decreased cellular processing, and the like, of an immune cell, e.g., as compared to a like cell not contacted with the signal. In embodiments, the negative signal or inhibitory signal decreases activation of an immune response.

[0156] As used herein, the term “inhibitory polypeptide” refers to a polypeptide, or a portion thereof, that is capable of associating with or binding to a negative signal. The inhibitory polypeptide may associate with a negative signal to induce the typical cascade of intracellular events associated with among other things, decreased proliferation, decreased activation, decreased cellular processing, and the like, of an immune cell. In some embodiments, the inhibitory polypeptide is an inhibitory polypeptide listed in Table 1 or Table 1.1.

[0157] As used herein, the term “positive signal” or “activating signal” refers to a signal, i.e., signaling molecule, that induces the typical cascade of intracellular events associated with, among other things, increased proliferation, increased activation, increased cellular processing, and the like, of an immune cell, e.g., as compared to a like immune cell not contacted with the signal. In embodiments, the positive signal or activating signal increases activation of an immune response.

[0158] As used herein, the term “stimulatory polypeptide” refers to a polypeptide, or a portion thereof, that is capable of associating with or binding to a positive signal. The stimulatory polypeptide may induce the typical cascade of intracellular events associated with, among other things, increased proliferation, increased activation, and/or increased cellular processing, and the like, of an immune cell. In some embodiments, the stimulatory polypeptide is selected from the polypeptides listed in Table 2 or Table 2.1.

[0159] As used herein, the term “pluripotent stem cell” refers to a stem cell that has the potential to differentiate into all cells constituting one or more tissues or organs, or preferably, any of the three germ layers: endoderm (e.g., interior stomach lining, gastrointestinal tract, the lungs), mesoderm (e.g., muscle, bone, blood, urogenital), or ectoderm (e.g., epidermal tissues and nervous system).

[0160] “Programming” is a process that alters the type of progeny a cell can produce. For example, a cell has been programmed when it has been altered so that it can form progeny of at least one new cell type, either in culture or in vivo, as compared to what it would have been able to form under the same conditions without programming. This means that after sufficient proliferation, a measurable proportion of progeny having phenotypic characteristics of the new cell type are observed, if essentially no such progeny could form before programming; alternatively, the proportion having characteristics of the new cell type is measurably more than before programming. This process includes differentiation, dedifferentiation, and transdifferentiation.

[0161] “Differentiation” is the process by which a less specialized cell becomes a more specialized cell type. “Dedifferentiation” is a cellular process in which a partially or terminally differentiated cell reverts to an earlier developmental stage, such as pluripotency or multipotency. “Transdifferentiation” is a process of transforming one differentiated cell type into another differentiated cell type. Typically, transdifferentiation by programming occurs without the cells passing through an intermediate pluripotency stage—i.e., the cells are programmed directly from one differentiated cell type to another differentiated cell type. Under certain conditions, the proportion of progeny with characteristics of the new cell type may be at least about 1%, 5%, 25% or more.

[0162] As used herein, the term “subject” or “subject in need thereof” refers to a mammal, preferably a human being, male or female, at any age that is in need of a therapeutic intervention, a cell transplantation, or a tissue transplantation. Typically, the subject is in need of therapeutic intervention, cell, or tissue transplantation (also referred to herein as recipient) due to a disorder or a pathological or undesired condition, state, or syndrome, or a physical, morphological or physiological abnormality which is amenable to treatment via therapeutic intervention, cell, or tissue transplantation.

[0163] As used herein, a “disruption” or “alteration” of a gene refers to the elimination or reduction of expression of one or more gene products encoded by the subject gene in a cell, compared to the level of expression of the gene product in the absence of the alteration. Exemplary gene products include mRNA and protein products encoded by the gene. Alteration in some cases is transient or reversible and in other cases is permanent. Alteration in some cases is of a functional or full-length protein or mRNA, despite the fact that a truncated or nonfunctional product may be produced. In some embodiments herein, gene activity or function, as opposed to expression, is disrupted. Gene alteration is generally induced by artificial methods, i.e., by addition or introduction of a compound, molecule, complex, or composition, and/or by alteration of nucleic acid of or associated with the gene, such as at the DNA level. Exemplary methods for gene alteration include gene silencing, knockdown, knockout, and/or gene alteration techniques, such as gene editing. Examples of gene editing methods include the use of CRISPR/Cas systems, meganuclease systems, Zinc Finger Protein (ZFP), and Zinc Finger Nuclease (ZFN) systems and/or transcription activator-like protein (TAL), transcription activator-like effector protein (TALE), or TALE nuclease protein (TALEN) systems. Examples of gene alteration also include the use of antisense technology, such as RNAi, siRNA, shRNA, and/or ribozymes, which generally result in transient reduction of expression, as well as gene editing techniques which result in targeted gene inactivation or alteration, e.g., by induction of breaks and/or homologous recombination. Examples include insertions, mutations, and deletions. The alterations typically result in the repression and/or complete absence of expression of a normal or “wild type” product encoded by the gene. Examples of such gene alterations are insertions, frameshift, and missense mutations, deletions, knock-in, and knock-out of the gene or part of the gene, including deletions of the entire gene. Such alterations can occur in the coding region, e.g., in one or more exons, resulting in the inability to produce a full-length product, functional product, or any product, such as by insertion of a stop codon. Such alterations may also occur by alterations in the promoter or enhancer or other region affecting activation of transcription, so as to prevent transcription of the gene. Gene alterations include gene targeting, including targeted gene inactivation by homologous recombination.

[0164] The terms “tumor-associated antigen,” “tumor antigen” and “cancer cell antigen” are used interchangeably herein. The terms refer to any antigenic substance produced, expressed, or overexpressed in tumor cells which may, for example, trigger an immune response in the host. The terms also refer to proteins, glycoproteins or carbohydrates that are specifically or preferentially expressed by cancer cells.

[0165] “Treating” or “treatment of a disease or condition” refers to executing a protocol or treatment plan, which may include administering one or more drugs to a subject (e.g., a patient), in an effort to alleviate signs or symptoms of the disease or the recurrence of the disease. Desirable effects of treatment include decreasing the rate of disease progression, ameliorating, or palliating the disease state, and remission, increased survival, improved quality of life or improved prognosis. Alleviation or prevention can occur prior to signs or symptoms of the disease or condition appearing, as well as after their appearance. In addition, “treating” or “treatment” does not require complete alleviation of signs or symptoms, and does not require a cure.

[0166] The term “therapeutic benefit” or “therapeutically effective” as used throughout this application refers to anything that promotes or enhances the well-being of the subject with respect to the medical treatment of this condition. This includes, but is not limited to, a reduction in the frequency, severity, or rate of progression of the signs or symptoms of a disease. For example, treatment of cancer may involve, for example, a reduction in the size of a tumor, a reduction in the invasiveness of a tumor, reduction in the growth rate of the cancer, or a reduction in the rate of metastasis or recurrence. Treatment of cancer may also refer to prolonging survival of a subject with cancer.

[0167] “Antigen recognition moiety or domain” or “antigen-binding domain,” refers to a molecule or portion of a molecule that specifically binds to an antigen. In some embodiments, the antigen recognition moiety is an antibody, antibody like molecule or fragment thereof and the antigen is a negative signaling molecule or a tumor antigen.

[0168] “Antibody” as used herein refers to monoclonal or polyclonal antibodies. An antibody can be an IgG1, IgG2, IgG3, IgG4, IgM, IgE, or IgA antibody. In some embodiments, an antibody can be a human or humanized antibody.

[0169] “Antibody like molecules” may be for example proteins that are members of the Ig-superfamily which are able to selectively bind a partner.

[0170] The terms “fragment of an antibody,” “antibody fragment,” “functional fragment of an antibody,” and “antigen-binding portion” are used interchangeably herein to mean one or more fragments or portions of an antibody that retain the ability to specifically bind to an antigen (see, generally, Holliger et al., Nat. Biotech. 23(9):1126-1129, 2005). The antibody fragment desirably comprises, for example, one or more CDRs, the variable region (or portions thereof), the constant region (or portions thereof), or combinations thereof. Examples of antibody fragments include, but are not limited to, (i) a Fab fragment: (ii) a F(ab′)₂ fragment: (iii) a Fv fragment; (iv) a single chain Fv (scFv); and (v) a diabody.

[0171] The term “antibody mimetic” is intended to describe an organic compound that specifically binds a target sequence and has a structure distinct from a naturally occurring antibody. Antibody mimetics may comprise a protein, a nucleic acid, or a small molecule. The target sequence to which an antibody mimetic of the disclosure specifically binds may be an antigen. Exemplary antibody mimetics include, but are not limited to, an affibody, an afflilin, an affimer, an affitin, an alphabody, an anticalin, an avimer (also known as avidity multimer), a DARPin (Designed Ankyrin Repeat Protein), a Fynomer, a Kunitz domain peptide, a monobody, and a centyrin.

[0172] The term “functional variant,” as used herein, refers to a polypeptide, or a protein having substantial or significant sequence identity or similarity to the reference polypeptide, and retains the biological activity of the reference polypeptide of which it is a variant. In reference to a nucleic acid sequence encoding the protein, a nucleic acid sequence encoding a functional variant of the protein can be for example, at least about 10% identical, at least about 25% identical, at least about 30% identical, at least about 50% identical, at least about 65% identical, at least about 70% identical, at least about 75% identical, at least about 80% identical, at least about 85% identical, at least about 90% identical, at least about 95% identical, or at least about 99% identical to the nucleic acid sequence encoding the reference polypeptide.

[0173] The phrases “pharmaceutically acceptable” or “pharmacologically acceptable” refers to molecular entities and compositions that do not produce an adverse, allergic, or other untoward reaction when administered to an animal, such as a human, as appropriate. For animal (e.g., human) administration, it will be understood that preparations should meet sterility, pyrogenicity, general safety, and purity standards as required by FDA Office of Biological Standards.

[0174] As used herein, “pharmaceutically acceptable carrier” includes any and all aqueous solvents (e.g., saline solutions, phosphate buffered saline, parenteral vehicles, such as sodium chloride, Ringer's dextrose, etc.), antioxidants, preservatives (e.g., antibacterial or antifungal agents, anti-oxidants, chelating agents, and inert gases), isotonic agents, such like materials and combinations thereof, as would be known to one of ordinary skill in the art. The pH and exact concentration of the various components in a pharmaceutical composition are adjusted according to well-known parameters.

[0175] The term “T cell” refers to T lymphocytes, and includes, but is not limited to, γ:δ⁺ T cells, NK T cells, CD4⁺ T cells and CD8⁺ T cells. CD4⁺ T cells include THO, Tₕ1 and TH2 cells, as well as regulatory T cells (T_{reg}). There are at least three types of regulatory T cells: CD4⁺ CD25⁺ T_{reg}, CD25 T_{H}3 T_{reg}, and CD25 T_{R} 1 T_{reg}. “Cytotoxic T cell” refers to a T cell that can kill another cell. The majority of cytotoxic T cells are CD8⁺ MHC class I-restricted T cells, however some cytotoxic T cells are CD4⁺. In some embodiments, the T cell of the present disclosure is CD4⁺ or CD8⁺.

[0176] The activation state of a T cell defines whether the T cell is “resting” (i.e., in the Go phase of the cell cycle) or “activated” to proliferate after an appropriate stimulus such as the recognition of its specific antigen, or by stimulation with OKT3 antibody, PHA or PMA, etc. The “phenotype” of the T cell (e.g., naive, central memory, effector memory, lytic effectors, help effectors (THI and TH2 cells), and regulatory effectors), describes the function the cell exerts when activated. A healthy donor has T cells of each of these phenotypes, and which are predominately in the resting state. A naive T cell will proliferate upon activation, and then differentiate into a memory T cell or an effector T cell. The cell can then assume the resting state again, until it gets activated the next time, to exert its new function and may change its phenotype again. An effector T cell will divide upon activation and antigen-specific effector function.

[0177] “Natural killer T cells” (NKT cells; not to be confused with natural killer cells of the innate immune system) bridge the adaptive immune system with the innate immune system. Unlike conventional T cells that recognize peptide antigens presented by major histocompatibility complex (WIC) molecules, NKT cells recognize glycolipid antigen presented by a molecule called CD1d. Once activated, these cells can perform functions ascribed to both Th and Tc cells (i.e., cytokine production and release of cytolytic/cell killing molecules). They are also able to recognize and eliminate some tumor cells and cells infected with herpes viruses.

[0178] “Natural killer cells” (“NK cells”) are a type of cytotoxic lymphocyte of the innate immune system. In some embodiments, NK cells provide a first line defense against viral infections and/or tumor formation. NK cells can detect MHC presented on infected or cancerous cells, triggering cytokine release, and subsequently induce lysis and apoptosis. NK cells can further detect stressed cells in the absence of antibodies and/or MHC, thereby allowing a rapid immune response.

[0179] An “artificial cell” is an engineered particle that mimics one or many functions of a biological cell. Artificial cells can comprise artificial structures where biologically active components, for example, proteins, genes, enzymes, or other cellular structures, are encapsulated in artificial membranes.

[0180] “AML,” as used herein, refers to acute myelogenous leukemia, also known as acute myelocytic leukemia, acute granulocytic leukemia, and acute non-lymphocytic leukemia. The term “AML” refers to all subtypes, including myeloblastic (MO) on special analysis, myeloblastic (MI) without maturation, myeloblastic (M2) with maturation, promyeloctic (M3), myelomonocytic (M4), monocytic (M5), erythroleukemia (M6) and megakaryocytic (M7).

[0181] “Relapsed AML” refers to subjects (e.g., patients) who have experienced a recurrence following an interval of remission of AML.

[0182] “Refractory AML” refers to subjects (e.g., patients) whose disease does not respond to the first cycle of initial standard induction therapy (e.g., anthracycline and/or cytarabine-based therapy). In some embodiments, “refractory AML” refers to subjects (e.g., patients) who lack remission following initial therapy. In some embodiments, “refractory AML” refers to subjects whose disease does not respond to one or two or more cycles of standard induction therapy.

[0183] The term “culturing” refers to the in vitro maintenance, differentiation, and/or propagation of cells in suitable media. By “enriched” is meant a composition comprising cells present in a greater percentage of total cells than is found in the tissues where they are present in an organism.

[0184] An “anti-cancer” agent is capable of negatively affecting a cancer cell/tumor in a subject, for example, by promoting killing of cancer cells, inducing apoptosis in cancer cells, reducing the growth rate of cancer cells, reducing the incidence, number, and/or rate of development of metastases, reducing solid tumor size, inhibiting tumor growth, reducing the blood supply to a tumor or cancer cells, promoting an immune response against cancer cells or a tumor, preventing or inhibiting the progression of cancer, or increasing the lifespan of a subject with cancer.

[0185] As used herein, “click reaction” refers to a range of reactions used to covalently link a first and a second moiety, for convenient production of linked products. It typically has one or more of the following characteristics: it is fast, is specific, is high-yield, is efficient, is spontaneous, does not significantly alter biocompatibility of the linked entities, has a high reaction rate, produces a stable product, favors production of a single reaction product, has high atom economy, is chemoselective, is modular, is stereoselective, is insensitive to oxygen, is insensitive to water, is high purity, generates only inoffensive or relatively non-toxic by-products that can be removed by nonchromatographic methods (e.g., crystallization or distillation), needs no solvent or can be performed in a solvent that is benign or physiologically compatible, e.g., water, stable under physiological conditions. Examples include an alkyne/azide reaction, a diene/dienophile reaction, or a thiol/alkene reaction. Other reactions can be used. In some embodiments, the click reaction is fast, specific, and high yield.

[0186] As used herein, “click handle” refers to a chemical moiety that is capable of reacting with a second click handle in a click reaction to produce a click signature. In embodiments, a click handle is comprised by a coupling reagent, and the coupling reagent may further comprise a substrate reactive moiety.

[0187] As used herein, “sortase” refers to an enzyme which catalyzes a transpeptidation reaction between a sortase recognition motif and a sortase acceptor motif. Various sortases from prokaryotic organisms have been identified. In some embodiments, the sortase catalyzes a reaction to conjugate the C-terminus of a first moiety containing a sortase recognition motif to the N-terminus of a second moiety containing a sortase acceptor motif by a peptide bond. In some embodiments, the sortase catalyzes a reaction to couple a first moiety to a second moiety by a peptide bond. In some embodiments, sortase mediated transfer is used to couple the N terminus of a first polypeptide, e.g., an extracellular binding domain of a protein on an NK cell to the N terminus of a second polypeptide, e.g., an antigen-binding domain, to the N terminus of a second polypeptide. In some embodiments, sortase mediated transfer is used to attach a coupling moiety, e.g., a “click” handle, to the N-terminus of each polypeptide, wherein the coupling moieties mediate coupling of the polypeptides. In some embodiments, the first polypeptide is an extracellular binding domain, e.g., an antigen-binding domain, comprising a sortase acceptor motif, and the second polypeptide is a transmembrane polypeptide comprising an extracellular N-terminal sortase acceptor motif, a transmembrane domain, and an intracellular domain. Sortase-mediated transfer is used to attach a coupling moiety, e.g., a click handle, to each polypeptide.

[0188] “Sortase acceptor motif,” as used herein, refers to a moiety that acts as an acceptor for the sortase-mediated transfer of a polypeptide. In some embodiments, the sortase acceptor motif is located at the N-terminus of a polypeptide. In some embodiments, the transferred polypeptide is linked by a peptide bond at its C-terminus to the N-terminal residue of the sortase acceptor motif. N-terminal acceptor motifs include Gly-[Gly]n- (SEQ ID NO: 1), wherein n=0-5 and Ala-[Ala]n- (SEQ ID NO: 2), wherein n=0-5.

[0189] “Sortase recognition motif,” as the term is used herein, refers to polypeptide which, upon cleavage by a sortase molecule, e.g., a, forms a thioester bond with the sortase molecule. In some embodiments, sortase cleavage occurs between T and G/A. In some embodiments, the peptide bond between T and G/A is replaced with an ester bond to the sortase molecule.

[0190] “Sortase transfer signature,” as the term is used herein, refers to the portion of a sortase recognition motif and the portion of a sortase acceptor motif remaining after the reaction that couples the former to the latter. In some embodiments, wherein the sortase recognition motif is LPXTG/A (SEQ ID NO: 3) and wherein the sortase acceptor motif is GG, the resultant sortase transfer signature after sortase-mediated reaction comprises LPXTGG (SEQ ID NO: 4).

[0191] As used herein, “signal transduction pathway” refers to the biochemical relationship between a variety of signal transduction molecules that play a role in the transmission of a signal from one region of a cell to another region of a cell.

[0192] As used herein, “signaling receptor” refers to a receptor that interacts with a ligand to trigger a biochemical chain of events inside the cell, creating a response, such as signal transduction, protein interaction, enzymatic activity, gene transcription, or a combination thereof. Exemplary examples of signaling receptors include, but are not limited to, TGF-BR, interleukin-2 receptor (IL-2R), interleukin-12 receptor (IL-12R), CD3, CD28, and CD137.

### II. Cells

[0193] Provided herein are cells engineered to comprise (e.g., to express) any of the proteins described herein. The engineered cells may be, e.g., immune cells (e.g., autologous or allogeneic T cells (e.g., regulatory T cells, type 1 regulatory T cells (Tr1), CD4⁺ T cells, CD8⁺ T cells, or gamma-delta T cells), NK cells (e.g., autologous or allogeneic NK cells), NKT cells (e.g., invariant NKT cells), stem cells (e.g., iPS cells), type 1 innate lymphoid cells (ILC1), intraepithelial type 1 innate lymphoid cells (ieILC1), type 2 innate lymphoid cells (ILC2), type 3 innate lymphoid cells (ILC3), lymphoid tissue inducer cells (LTi), monocytes, macrophages, dendritic cells (DC), platelets, marrow-infiltrating lymphocytes (MIL), or B cells), fibrocytes, mesenchymal stem cells, induced neural stem cells, induced pluripotent stem cell (iPSC)-derived cells, platelets, or erythrocytes. In some embodiments, the engineered cells are tumor infiltrating lymphocytes (TILs).

[0194] In some embodiments, the cells are immune cells. Cells of the immune system include lymphocytes, monocytes/macrophages, dendritic cells, the closely related Langerhans cells, natural killer (NK) cells, mast cells, basophils, and other members of the myeloid lineage of cells.

[0195] Provided herein are modified cells, e.g., immune cells that have been engineered to comprise (e.g., express) any of the engineered proteins (e.g., chimeric proteins) described herein. The engineered immune cells may be T cells (e.g., regulatory T cells, CD4⁺ T cells, CD8⁺ T cells, or gamma-delta T cells), NK cells, invariant NK cells, NKT cells, and may be derived from stem cells (e.g., induced pluripotent stem (iPSC) cells). In some embodiments, the engineered immune cells are monocytes or granulocytes, e.g., myeloid cells, macrophages, neutrophils, dendritic cells, mast cells, eosinophils, and/or basophils. Also provided herein are methods of producing and engineering the engineered immune cells. Further provided are methods of using and administering the engineered immune cells, e.g., for adoptive cell therapy, in which case the cells may be autologous or allogeneic. Thus, the engineered immune cells provided herein may be used as an immunotherapy, such as to target cancer cells.

[0196] Engineered cells, e.g., immune cells such as NK cells, of the present disclosure are produced by engineering a cell to comprise, e.g., to express, any of the proteins described herein. The cells may be isolated from subjects, particularly human subjects. The cells may be obtained from a subject of interest, such as a subject suspected of having a particular disease or condition, a subject suspected of having a predisposition to a particular disease or condition, or a subject who is undergoing therapy for a particular disease or condition. In some embodiments, the cells, e.g., immune cells such as NK cells, may be obtained from a subject in need of immunotherapy. In some embodiments, the cells, e.g., immune cells such as NK cells, can be obtained from a normal, healthy subject. In some embodiments, the cells, e.g., immune cells such as NK cells, are allogeneic to a subject in need of treatment. In some embodiments, the cells, e.g., immune cells such as NK cells, are autologous to a subject in need of treatment.

[0197] The cells, e.g., immune cells, such as NK cells, may be enriched and/or purified from any tissue where they reside including, but not limited to, blood (including blood collected by blood banks or cord blood banks), spleen, bone marrow, tissues removed and/or exposed during surgical procedures, and tissues obtained via biopsy procedures. Tissues/organs from which the cells are enriched, isolated, and/or purified may be isolated from living or non-living subjects, where the non-living subjects are organ donors. The isolated cells may be used directly, or they can be stored for a period of time, such as by freezing. In some embodiments, the cells are isolated from blood, such as peripheral blood or cord blood. In some embodiments, the cells, e.g., immune cells, such as NK cells, are isolated from cord blood have enhanced immunomodulation capacity, such as measured by CD4- or CD8-positive T cell suppression. In some embodiments, the cells, e.g., immune cells, such as NK cells, are isolated from pooled blood, particularly pooled cord blood, for enhanced immunomodulation capacity. The pooled blood may be from 2 or more sources, such as 3, 4, 5, 6, 7, 8, 9, 10 or more sources (e.g., donor subjects).

[0198] When the population of cells, e.g., immune cells, such as NK cells, is obtained from a donor distinct from the subject to be treated, the donor is preferably allogeneic, provided the cells obtained are subject-compatible in that they can be introduced into the subject. Allogeneic donor cells may or may not be human-leukocyte-antigen (HLA)-compatible. To be rendered subject-compatible, allogeneic cells can be treated to reduce immunogenicity.

[0199] In some embodiments, the modified immune cells of the present disclosure are NK cells. NK cells differentiate and mature in the bone marrow, lymph nodes, spleen, tonsils, and thymus. NK cells can be detected by specific surface markers, canonically as CD56⁺ and CD3⁻, as well as CD2, CD11a, CD11b, CD18, and CD18 in humans. In the blood, human NK cells are commonly divided into CD56-high/CD16-low and CD56-low/CD16-high subsets. NK cells do not express T cell antigen receptors, the pan T marker CD3, surface immunoglobulin B cell receptors. NK cells may be distinguished from rare CD56⁺ CD3⁻ monocytes and dendritic cells as CD7⁺ and low/no expression of CD14, HLA-DR, CD33, and other myeloid markers.

[0200] Stimulation of NK cells is achieved through a crosstalk of signals derived from cell surface activating and inhibitory receptors. The activation status of NK cells is regulated by a balance of intracellular signals received from an array of germ-line-encoded activating and inhibitory receptors (Campbell, Curr. Top. Microbiol. Immunol. 298:23-57, 2006; the entire contents of which are incorporated herein by reference). When NK cells encounter an abnormal cell (e.g., tumor or virus-infected cell) and activating signals predominate, the NK cells can rapidly induce apoptosis of the target cell through directed secretion of cytolytic granules containing perforin and granzymes or engagement of death domain-containing receptors. Activated NK cells can also secrete type I cytokines, such as interferon-γ, tumor necrosis factor-α and granulocyte-macrophage colony-stimulating factor (GM-CSF), which activate both innate and adaptive immune cells, as well as other cytokines and chemokines (Wu et al., Adv. Cancer Res. 90:127-56, 2003, the entire contents of which are incorporated herein by reference). Production of these soluble factors by NK cells in early innate immune responses significantly influences the recruitment and function of other hematopoietic cells. Also, through physical contacts and production of cytokines, NK cells are central players in a regulatory crosstalk network with dendritic cells and neutrophils to promote or restrain immune responses.

[0201] In some embodiments, NK cells are derived from human peripheral blood mononuclear cells (PBMCs), unstimulated leukapheresis products (PBSC), human embryonic stem cells (hESCs), induced pluripotent stem cells (iPSCs), mesenchymal stem cells (MSCs), hematopoietic stem cells (HSCs), bone marrow, CD34⁺ cells, or umbilical cord blood (CB) by using methods well known in the art. In some embodiments, NK cells are isolated from PBMCs. In some embodiments, NK cells are derived from umbilical CB. In some embodiments, the NK cells are of an NK cell lines, e.g., NK-92, NK101, KHYG-1, YT, NK-YS, YTS, HANK-1, NKL, and NK3.3 cell lines.

[0202] NK cells can be differentiated from stem cells by various methods known in the art. In some instances, NK cells can be differentiated from induced pluripotent stem cells (iPSCs), human embryonic stem cells (hESCs), mesenchymal stem cells (MSCs), or hematopoietic stem cells (HSCs). Protocols for the differentiation of NK cells from iPSCs and hESCs are described, for example, in Bock et al. J. Vis. Exp. (74):e50337, 2013; Knorr et al. Stem Cells Transl. Med. 2(4):274-83, 2013; Ni et al. Methods Mol. Biol. 1029:33-41, 2013; Zhu and Kaufman (Methods Mol. Biol. 2048:107-19, 2019). In order to differentiate iPSCs to CD34⁺CD45⁺ HPCs, embryonic bodies (EB) can be generated using different approaches, such as spinning of single cell iPSCs in round-shaped wells (spin EBs), culture on murine stroma cells, or direct induction of iPSC monolayer fragments in media with cytokines inducing differentiation towards the hematopoietic lineage. HPCs can be enriched by cell sorting or cell separation of CD34⁺ and/or CD45⁺ cells, and subsequently placed on murine feeder cells (e.g., AFT024, OP9, MS-5, EL08-1D2) in medium containing IL-3 (during the first week), IL-7, IL-15, SCF, IL-2, and Flt3L. NK-cells can also be differentiated without usage of xenogeneic stromal feeder cells, as described, e.g., by Knorr et al. Stem Cells Transl. Med. 2(4):274-83, 2013. CD3⁻CD56^{bright}CD16^{+/-} NK cells can be differentiated from hiPSC up to stage 4b (NKp80⁺) on OP9-DL1 stroma cells and are highly functional in terms of degranulation, cytokine production and cytotoxicity including antibody-dependent cellular cytotoxicity (ADCC). NK cell yield can be considerably increased through inactivation of feeder cells with mitomycin-C(MMC) without impacting on maturation or functional properties.

[0203] Additionally or in alternative, CD56⁺CD16⁺CD3⁻ NK cells can be differentiated from human iPSCs and NK-cell development can be characterized by surface expression of NK-lineage markers, as described, e.g., by Euchner et al. Front. Immunol. 12:640672, 2021. Hematopoietic priming of human iPSCs can result in CD34⁺CD45⁺ hematopoietic progenitor cells (HPC) that do not require enrichment for NK lymphocyte propagation. HPC can be further differentiated into NK cells on OP9-DL1 feeder cells resulting in high purity of CD56^{bright}CD16⁻ and CD56^{bright}CD16⁺ NK cells. The output of generated NK cells can be increased by inactivating OP9-DL1 feeder cells with MMC. CD7 expression can be detected from the first week of differentiation indicating priming towards the lymphoid lineage. Differentiation of NK cells up to stage 4b can be confirmed by assessing the expression of NKp80 on NK cells, and by a perforin⁺ and granzyme B⁺ phenotype. Differentiation of NK cells can also be confirmed by assessing killer cell immunoglobulin-like receptor KIR2DL2/DL3 and KIR3DL1 on NK cells.

[0204] In some instances, CD3⁻CD56⁺ NK cells can be differentiated from CD34⁺ hematopoietic progenitors cells (HPCs), as described, e.g., by Cichocki et al. Front Immunol, 10: 2078, 2019. NK cell development can occur along a continuum whereby common lymphocyte progenitors (CLPs) gradually downregulate CD34 and upregulate CD56. Acquisition of CD94 marks commitment to the CD56^{bright} stage, and CD56^{bright} NK cells subsequently differentiate into CD56^{dim} NK cells that upregulate CD16 and killer immunoglobulin-like receptors (KIR). Support for this linear model comes from analyses of cell populations in secondary lymphoid tissues and in vitro studies of NK cell development from HPCs.

[0205] CD3⁻CD56⁺ NK cells with cytotoxic function can be differentiated in vitro after long-term culture of CD34⁺ cells isolated from cord blood, bone marrow, fetal liver, thymus, or secondary lymphoid tissue with IL-2 or IL-15, as described, e.g., by Mrozek et al. Blood 87:2632-40, 1996; Jaleco et al. J. Immunol. 159:694-702, 1997; Sanchez et al. J. Exp. Med. 178:1857-66, 1993; and Freud et al. Immunity 22:295-304, 2005.

[0206] In some embodiments, the NK cells are isolated and expanded using a previously described method of ex vivo expansion of NK cells (Shah et al., PLoS One 8(10):e76781, 2013; the entire contents of which are incorporated herein by reference). In this method, CB mononuclear cells are isolated by Ficoll density gradient centrifugation and cultured in a bioreactor with IL-2 and artificial antigen presenting cells (aAPCs). After 7 days, the cell culture is depleted of any cells expressing CD3 and re-cultured for an additional 7 days. The cells are again CD3-depleted and characterized to determine the percentage of CD56⁺/CD3⁺ cells or NK cells. In some embodiments, NK cells are derived from umbilical CB by the isolation of CD34⁺ cells and differentiation into CD56⁺/CD3⁺ cells by culturing in medium containing SCF, IL-7, IL-15, and IL-2.

[0207] In some embodiments, NK cells can be expanded or enriched from large volumes of peripheral blood, such as an apheresis products (e.g., mobilized PBSCs or unmobilized PBSCs). In other instances, NK cells can be expanded or enriched from smaller number of blood or stem cells. Expansion of NK cells from apharesis products are described, for example, in Lapteva et al. Crit. Rev. Oncog. 19:121-132, 2014; Miller et al. Blood 105(8):3051-7, 2005; Lapteva et al. Cytotherapy 14(9):1131-43, 2012; Spanholtz et al. PLoS One 6(6):e20740, 2011; Knorr et al. Stem Cells Transl. Med. 2(4):274-83, 2013; Pfeiffer et al. Leukemia 26(11):2435-9, 2012; Shi et al. Br. J. Haematol. 143(5):641-53, 2008; Passweg et al. Leukemia 18(11):1835-8, 2004; Koehl et al. Klin. Padiatr. 217(6):345-50, 2005; and Klingemann et al. Transfusion 53(2):412-8, 2013. In some embodiments, NK cells in peripheral blood and apheresis products can be detected by flow cytometry as CD45⁺CD56⁺CD3⁻ cells. In some instances, NK cells can be enriched from apheresis products by one or two rounds of depletion of CD3⁺ T cells using magnetic beads (e.g., CLINIMACS magnetic beads) coated with anti-CD3 antibody (e.g., CLINIMACS CD3 reagent) with or without overnight activation using IL-2 or IL-15. Additional depletion of CD19⁺ B cells with anti-CD19 antibody-coated magnetic beads (e.g., CliniMACS CD19 reagent) can further improve the purity of the NK cells. Alternatively, NK cells can be enriched by isolating CD56⁺ cells using anti-CD56 monoclonal antibody (e.g., CLINIMACS CD56 reagent) with or without CD3⁺ T cell depletion.

[0208] In some embodiments, NK cells can be expanded using feeder cell-based technology. Such methods are described, for example, in Berg et al. Cytotherapy 11(3):341-55, 2009; Lapteva et al. 2012, supra; and Lapteva et al. Crit. Rev. Oncog. 19:121-132, 2014. Feeder-cell methods generally require cytokines as well as irradiated feeder cells, such as EBV-LCLs or genetically modified K562 cells, to produce large numbers of CD3⁻56⁺ NK cells with greater than 70% purity from peripheral blood mononuclear cells (PBMCs). CD3-depleted, CD56-enriched PBMCs can be cultured in the presence of EBV-LCL feeders and X-VIVO 20 medium supplemented with 10% heat inactivated human AB serum, 500 U/mL IL-2 and 2 mM L-alanyl-L-glutamine (Berg et al. Cytotherapy, 11(3):341-55, 2009).

[0209] In some embodiments, NK cells can be expanded using a genetically modified feeder cell expansion system, as described, for example, in Yang et al. (Mol. Therapy 18:428-445, 2020). In such expansion methods, human primary NK cells can be expanded directly from PBMCs and cord blood (CB), as well as tumor tissue, using an irradiated, genetically engineered cell line that expresses membrane-bound interleukin 21 (IL-21), optionally in combination in the presence of IL-15 and IL-2. Other methods of NK expansion are described in Becker et al., Cancer Immunol. Immunother. 65(4): 477-84, 2016, Phan et al., Methods Mol. Biol. 1441:167-74, 2016, each of which are incorporated herein in reference in their entireties. Commercially available kits for expanding NK cells, such as CELLXVIVO Human NK Cell Expansion Kit (R&D Systems; Cat. No. CDK015) and NK Cell Activation/Expansion Kit, human (MILTENYI BIOTEC; Cat No. 130-094-483) can also be used with the methods described herein.

[0210] In some embodiments, the modified NK cells of the present disclosure are prepared directly from NK cells, e.g., by engineering the NK cells to comprise (e.g., express) a chimeric protein disclosed herein. In some embodiments, the modified NK cells are prepared by engineering an NK precursor cell to comprise (e.g., express) a chimeric protein disclosed herein, and the modified NK cell is then produced from the engineered precursor cell.

[0211] In some embodiments, the modified immune cells of the present disclosure are T cells. In some embodiments, the immune cells are alpha beta T cells and gamma delta T cells). In some embodiments, the immune cells are T cells that are one or more of CD3⁺, CD28⁺, CD4⁺, CD8⁺, CD45RA⁺, CD25⁺ and CD45RO⁺. In some embodiments, the T cells are isolated tumor infiltrating lymphocytes (TIL). In some embodiments, the T cells are CD4⁺ T cells. In some embodiments, the T cells are CD8⁺ T cells. In some embodiments, the T cells are regulatory T cell (e.g., a CD4⁺, CD25⁺, CD62L^{hi}, GITR⁺ and FoxP3⁺ T cells). In some embodiments, the T cells are memory T cells (TCM) (e.g., CD62L⁺, CCR7⁺, CD45RO⁻ and CD45RA⁻ T cells). In some embodiments, the T cells are stem cell memory T cells. In some embodiments, the T cells are naïve T cells. In some embodiments, the T cells are a mixed population of CD4⁺ T cells, CD8⁺ T cells, stem cell memory T cells and naïve T cells.

[0212] The immune cells provided herein may be expanding using methods known in the art (see e.g., Gregory et al. Methods Mol. Biol. 380:83-105, 2007; Tricket and Kwan, J. Immunol. Methods 275(1-2):251-5, 2003; Schluck et al. Front Immunol. 10:931; Peters et al. Methods Enzymol. 631:223-37, 2020; Andrews et al. Cytotherapy 22(5):276-90; Exley et al. Curr. Protoc. Immunol. 119:14.11.1-14.11.20, 2017; and Becker et al. Cancer Immunol Immunother. 65(4): 477-84). For example, T cells can be expanding by contacting them with a surface having attached thereto an agent that stimulates a CD3/TCR complex-associated signal and a ligand that stimulates a costimulatory molecule on the surface of the T cells, including but not limited to an anti-CD3 antibody or antigen-binding fragment thereof, an anti-CD2 antibody immobilized on a surface, a protein kinase C activator (e.g., bryostatin) in conjunction with a calcium ionophore. In addition, the T cells may also be contacted with a ligand that binds to an accessory molecule on the surface of the T cells (e.g., an anti-CD3 antibody and an anti-CD28 antibody under conditions suitable for the stimulation and proliferation of the T cells.

[0213] In some embodiments, the modified immune cells of the present disclosure are natural killer T (NKT) cells. NKT cells are a heterogeneous group of T cells that share properties of both T cells and natural killer cells. Many of these cells recognize the non-polymorphic CD1d molecule, an antigen-presenting molecule that binds self and foreign lipids and glycolipids.

[0214] In some embodiments, the modified immune cells are invariant NKT (iNKT) cells. In some embodiments, the modified immune cells are type 2 NKT cells.

[0215] In some embodiments, the modified immune cells of the present disclosure are macrophages. In some embodiments, the modified immune cells are M1 macrophages. In some embodiments, the modified immune cells are M2 macrophages. Macrophages can be identified using flow cytometry or immunohistochemical staining by their specific expression of proteins such as CD14, CD40, CD11b, CD64, F4/80 (mice)/EMR1 (human), lysozyme M, MAC-1/MAC-3 and CD68 (Khazen et al., FEBS Letters. 579 (25):5631-4, 2005).

[0216] In some embodiments, the cells, e.g., modified immune cells, of the present disclosure are stem cells, such as induced pluripotent stem cells (PSCs), mesenchymal stem cells (MSCs), or hematopoietic stem cells (HSCs). The pluripotent stem cells used herein may be induced pluripotent stem (iPS) cells, commonly abbreviated iPS cells, iPscs, or iPSCs. With the exception of germ cells, any cell can be used as a starting point for iPSCs. For example, cell types could be keratinocytes, fibroblasts, hematopoietic cells, mesenchymal cells, liver cells, or stomach cells. There is no limitation on the degree of cell differentiation or the age of an animal from which cells are collected. For example, undifferentiated progenitor cells (including somatic stem cells) and finally differentiated mature cells can be used as sources of somatic cells in the methods disclosed herein. Somatic cells can be reprogrammed to produce iPSCs using methods known to one of skill in the art (U.S. Patent Application Publication Nos. 2009/0246875, 2010/0210014, and 2011/0104125; 2012/0276636, U.S. Pat. Nos. 8,058,065, 8,129,187, 8,268,620, 8,546,140, 9,175,268, 8,741,648, and 8,691,574, and PCT Publication No. WO 2007/069666 A1, the entire contents of each of which are incorporated herein by reference). Generally, nuclear reprogramming factors are used to produce pluripotent stem cells from a somatic cell. In some embodiments, at least three, or at least four of Klf4, c-Myc, Oct3/4, Sox2, Nanog, and Lin28 are utilized. In other embodiments, Oct3/4, Sox2, c-Myc and Klf4 are utilized or Oct3/4, Sox2, Nanog, and Lin28. Methods for introducing one or more reprogramming substances, or nucleic acids encoding these reprogramming substances, are known in the art, and disclosed for example, in U.S. Pat. Nos. 8,268,620, 8,691,574, 8,741,648, 8,546,140, 8,900,871, and 8,071,369, which are incorporated herein by reference.

[0217] Once derived, iPSCs can be cultured in a medium sufficient to maintain pluripotency. iPSCs may be used with various media and techniques developed to culture pluripotent stem cells, more specifically, embryonic stem cells, as described in U.S. Pat. No. 7,442,548 and U.S. Patent Application Publication No. 2003/0211603, the entire contents of each of which are incorporated by reference herein. For example, pluripotent cells may be cultured and maintained in an essentially undifferentiated state using a defined, feeder-independent culture system, such as a TESR™ medium or E8™/Essential 8™ medium.

### III. Proteins of the Disclosure

[0218] According to the present disclosure, cells, e.g., immune cells (e.g., autologous or allogeneic T cells (e.g., regulatory T cells, type 1 regulatory T cells (Tr1), CD4⁺ T cells, CD8⁺ T cells, or gamma-delta T cells), NK cells, NKT cells (e.g., invariant NKT cells), stem cells (e.g., iPS cells), type 1 innate lymphoid cells (ILC1), intraepithelial type 1 innate lymphoid cells (ieILC1), type 2 innate lymphoid cells (ILC2), type 3 innate lymphoid cells (ILC3), lymphoid tissue inducer cells (LTi), monocytes, macrophages, dendritic cells (DC), platelets, marrow-infiltrating lymphocytes (MIL), or B cells), fibrocytes, mesenchymal stem cells, induced neural stem cells, induced pluripotent stem cell (iPSC)-derived cells, platelets or erythrocytes) may be engineered to comprise (e.g., express) one or more (e.g., two, three, four, or five) engineered proteins (e.g., chimeric proteins) disclosed herein. The engineered proteins (e.g., chimeric proteins) included in a modified cell, e.g., immune cell, such as an NK cell, may take the form of several different modalities. These modalities include, but are not limited to, a sink, a dominant negative receptor, and a signal inverter. In some embodiments, an engineered protein (e.g., chimeric protein) described herein may have one or more characteristics of these modalities.

### Sinks

[0219] A sink or sink protein, as used herein, refers to a protein comprising an extracellular domain and a transmembrane domain, wherein the extracellular domain binds to a negative signal (e.g., an exogenous ligand that inhibits the activation of an immune response), and wherein the protein lacks a fully functional intracellular domain. In some embodiments, the intracellular domain is fully non-functional. In some embodiments, the intracellular domain is naturally multi-functional, and the intracellular domain in the sink protein lacks an inhibitory function but retains other functions, e.g., a stimulatory function. In some embodiments, the sink protein lacks an intracellular domain. In some embodiments, the sink protein comprises a transmembrane domain and an extracellular domain from the same protein, e.g., the sink protein is a truncated protein lacking its intracellular domain. In some embodiments, a sink protein comprises a transmembrane domain that is derived from a different protein than the extracellular domain, i.e., the sink protein is a chimeric protein. In some embodiments, the extracellular domain of the sink protein is cleaved from the cell membrane.

[0220] In some embodiments, a sink protein may function by competing with an endogenously expressed protein for access and binding to a negative signal. However, because the sink protein lacks a fully functional intracellular domain, it is unable to induce downstream signaling that leads to an inhibitory function upon binding the negative signal. While not wishing to be bound by theory, the ability of a sink protein to interfere or block a negative signal may occur through passive interference and so may depend on the ratio of the sink protein to the endogenously expressed wild-type protein (e.g., a wild-type protein having the same extracellular domain as the sink protein) on the cell, as well as the availability of the negative signal.

### Dominant Negative Receptors (DNRs)

[0221] A dominant negative receptor (DNR), as used herein, refers to a dominant negative isoform of a protein, wherein the dominant negative isoform of the protein competes with a wild-type isoform of the protein for binding a negative signal (e.g., an exogenous ligand that inhibits the activation of an immune response). Therefore, a DNR impairs the function of an endogenously expressed protein either by forming non-functional complexes, by sequestering adaptor and/or co-receptor proteins, and/or by other mechanisms that prevent the endogenous wild-type receptors from conveying a negative signal regardless of whether or not binding to their ligand(s) occurs. Unlike a sink, which acts on and directly binds to the negative signal, a DNR inhibits the activity of a negative signal by acting on, e.g., binding to, the endogenously expressed wild-type receptor that naturally conveys the negative signal. While not wishing to be bound by theory, a true dominant negative complex may occur through active interference (unlike a sink, whose interference may be passive) and so would not be expected to be overwhelmed by high concentrations of the negative signal. The mechanism of action of a DNR can be demonstrated by using any number of protein structure-function studies, which would be apparent to those of skill in the art.

[0222] In some embodiments, truncating the intracellular domain of a receptor protein can create both a sink and a DNR. For example, truncating the intracellular domain of any one of TGF-BR2, TGF-BR1, IL-10RA, and TIGIT could, in some embodiments, create a truncated protein that functions as both a sink and a DNR modality of the disclosure.

### Signal Inverters

[0223] A signal inverter refers to a chimeric protein of the disclosure which comprises an extracellular domain, a transmembrane domain, and an intracellular domain, wherein the extracellular domain is capable of binding a negative signal (e.g., an exogenous ligand that inhibits activation of an immune response), and wherein the intracellular domain comprises at least a portion of the intracellular domain of a stimulatory polypeptide that is associated with a positive signal that promotes activation of an immune response/activates an immune cell.

[0224] A signal inverter may comprise an extracellular domain (or a portion thereof) of a natural isoform or an engineered variant of a protein that binds a negative signal. A signal inverter may comprise an intracellular domain (or a portion thereof) of a natural isoform of a protein that preferentially or exclusively interacts with pro-activation partners, or a protein altered to do so. For example, an exemplary signal inverter of the present disclosure is a chimeric protein comprising a TGF-B-binding extracellular domain fused to a DAP12 intracellular domain. Additional examples of signal inverters are described herein.

### Signal Transformers

[0225] A signal transformer, as used herein, refers to an engineered genomic locus of an immune cell (e.g., NK cell) that encodes a positive signal, wherein the genomic expression of the positive signal is induced by a negative signal, i.e., the signal transduction pathway associated with a negative signal. The signal transformer may be engineered at a genomic locus that is independent of an endogenous genomic locus naturally targeted by the negative signal. In such embodiments, the negative signal will induce expression of both the signal transformer as well as the endogenous genomic locus (referred to as a “knock-in” signal transformer). Alternately, the signal transformer may be engineered into an endogenous genomic locus naturally targeted by the negative signal, and thereby negate the expression from the endogenous genomic locus (referred to as a “knock-in, knock-out” signal transformer).

[0226] In some embodiments, a signal transformer comprises an engineered genomic locus of an immune cell (e.g., NK cell) that encodes a DAP12 signal, whose expression is induced by a negative signal (e.g., TGF-B). In some embodiments, DAP12 signal is engineered into an endogenous PD-1 genomic locus naturally targeted by the negative signal (e.g., TGF-B induced Smad2 activation).

### Override

[0227] An override refers to a natural isoform or an engineered variant of a protein that generates a positive signal in an immune cell (e.g., NK cell), that is capable of enhancing anti-tumor activity despite the negative signals received by an immune cell (e.g., NK cell). A protein of the override modality does not influence a negative signal, or a signal transduction pathway associated therewith, and functions despite the immune cell (e.g., NK cell) also experiencing one or more negative signals.

[0228] In some embodiments, an engineered protein (e.g., chimeric protein) of the override modality comprises a DAP12 protein that is capable of being constitutively expressed on the surface of a cell, e.g., an immune cell (e.g., an NK cell).

### Protein Domains

[0229] The present disclosure provides engineered proteins (e.g., chimeric proteins) and cells, e.g., immune cells, e.g., NK cells, that have been engineered to comprise (e.g., express) the engineered proteins (e.g., chimeric proteins). In some embodiments, the engineered proteins (e.g., chimeric proteins) comprise one or more of a) an extracellular domain, b) a transmembrane domain, and c) an intracellular domain. In some embodiments, the engineered proteins (e.g., chimeric proteins) of the disclosure comprise an extracellular domain and a transmembrane domain. In some embodiments, the engineered proteins (e.g., chimeric proteins) of the disclosure comprise an extracellular domain, a transmembrane domain, and one or more intracellular domains. In some embodiments, the engineered proteins (e.g., chimeric proteins) further include one or more linkers (e.g., disposed between an extracellular domain and a transmembrane domain, between a transmembrane domain and an intracellular domain, and/or between two or more intracellular domains). In some embodiments, the extracullular domain is linked to one or more additional domains (e.g., a transmembrane domain and/or intracellular domain) via a linker. For example, in some embodiments, once an extracellular domain engages a negative signal (e.g., binds its corresponding ligand), the intracellular domain transmits an activation signal to the cell, e.g., NK cell, that promotes an immune response, e.g., induces the NK cell to destroy a targeted tumor cell.

[0230] A. Intracellular Domains

[0231] In some embodiments, an extracellular domain that may be comprised in an engineered protein (e.g., chimeric protein) of the disclosure comprises at least a portion of the extracellular domain of an inhibitory polypeptide (receptor) that associates with a negative signal (ligand). In some embodiments, the inhibitory polypeptide from which the extracellular domain is derived is selected from the inhibitory polypeptides presented in Table 1. In some embodiments, the extracellular domain of an engineered protein (e.g., chimeric protein) provided herein comprises or consists of the extracellular domain of an inhibitory polypeptide presented in Table 1.

TABLE 1
Inhibitory Polypeptides

| Inhibitory Polypeptide | | Negative Signal | Other ligand-binding |
|---|---|---|---|
| (receptor) | UNIPROT ID | (ligand) | substitutes |
| Adenosine receptor A2A | P29274 | Adenosine | AIR or A3 |
| Adenosine receptor A2B | P29275 | Adenosine | AIR or A3 |
| Prostaglandin receptor EP2 | P43116 | Prostaglandins | EP1 or EP3 |
| Prostaglandin receptor EP4 | P35408 | Prostaglandins | EP1 or EP3 |
| TGF-BR1 | P36897 | TGF-β | TGF-BR2 |
| TGF-BR2 | P37173 | TGF-β | TGF-BR1 |
| IL-10RA | Q13651 | IL-10 | |
| IL-10RB | Q08334 | IL-10 | |
| IL-18BP | O95998 | IL-18 | |
| IL-1R8 | A0A291NLA3 | IL-1 family | Non-cleavable IL-1R2 |
| IL-6RA | P08887 | IL-6 | |
| IL-6RB ( also known as | P40189 | IL-6 family | |
| gp130 and CD130) | | | |
| PD-1 | Q15116 | PD-L1/2 | B7-1 |
| CTLA-4 | P16410 | B7-1/2 | |
| TIM-3 | Q8TDQ0 | Multiple, disparate | TIM-1/4, RAGE, others |
| Lag3 | P18627 | MHCII and others | |
| BTLA | Q7Z6A9 | HVEM | LIGHT, CD160 |
| CD160 | O95971 | HVEM | LIGHT, BTLA |
| TIGIT | Q495A1 | CD155 and CD112 | DNAM-1, CD96, |
| | | | TACTILE, PVRIG, |
| | | | KIR2DL5A/B |
| TACTILE (also | P40200 | CD155 and CD111 | As for TIGIT |
| known as CD96) | | | |
| CD200R | Q8TD46 | CD200 | |
| NKp30c | O14931-2 | B7-H6, HS-GAGs | |
| KIR2DL1 | P43626 | Multiple HLA | Other KIRs, LILRs |
| KIR2DL2 | P43627 | Multiple HLA | Other KIRs, LILRs |
| KIR2DL3 | P43628 | Multiple HLA | Other KIRs, LILRs |
| KIR2DL5A | Q8N109 | CD155 | As for TIGIT |
| KIR2DL5B | Q8NHK3 | CD155 | As for TIGIT |
| KIR3DL1 | P43629 | Multiple HLA | Other KIRs, LILRs |
| KIR3DL2 | P43630 | Multiple HLA | Other KIRs, LILRs |
| KIR3DL3 | Q8N743 | Not validated | |
| LILRB1 | Q8NHL6 | Multiple HLA | Other LILRs, KIRs |
| LILRB2 | Q8N423 | Multiple HLA | Other LILRs, KIRs |
| LILRB3 | O75022 | Likely multiple | Other LILRs, KIRs |
| | | HLA | |
| LILRB4 | Q8NHJ6 | Multiple HLA | Other LILRs, KIRs |
| LILRB5 | O75023 | Multiple HLA | Other LILRs, KIRs |
| CEACAM-1 (CD66a) | P13688 | Multiple, disparate | Isoforms with other |
| | | | extracellular sequences |
| NKG2A | P26715 | HLA-E | CD94 |
| CD94 | Q13241 | HLA-E | NKG2A |
| KLRB1 (NKR-P1A) | Q12918 | Multiple, | |
| | | carbohydrates | |
| KLRG1 | Q96E93 | N- and E-cadherin | |
| CD33 | P20138 | Multiple, sialic | |
| | | glycans | |
| Siglec-7 | Q9Y286 | Multiple, sialic | |
| | | glycans | |
| Siglec-9 | Q9Y336 | Multiple, sialic | |
| | | glycans | |
| Siglec-10 | Q96LC7 | Multiple, sialic | |
| | | glycans | |
| Fas | P25445 | FasL | |
| FCRL6 | Q6DN72 | MHCII | |

[0232] In some embodiments, the extracellular domain comprises at least a portion of the extracellular domain of an inhibitory polypeptide that binds to a small molecule ligand. In some embodiments, the extracellular domain comprises at least a portion of the extracellular domain of an inhibitory polypeptide that binds to a soluble ligand, e.g., a cytokine. In some embodiments, the extracellular domain comprises at least a portion of the extracellular domain of an inhibitory polypeptide that binds to a cell surface ligand. In some embodiments, the extracellular domain comprises the extracellular domain, or a portion thereof, of one or more inhibitory polypeptides presented in Table 1.

[0233] In some embodiments, the extracellular domain comprises the extracellular domain, or a portion thereof, of: an adenosine receptor A2A that associates with an adenosine; an adenosine receptor A21B that associates with an adenosine; a prostaglandin receptor EP2 that associates with a prostaglandin; a prostaglandin receptor EP4 that associates with a prostaglandin; a TGF-BR1 that associates with a TGF-β polypeptide (also referred to herein as a “TGF-B polypeptide”); a TGF-BR2 that associates with a TGF-β3 polypeptide; an IL-10RA that associates with an IL-10 polypeptide; an IL-10RB that associates with an IL-10 polypeptide; an IL-18BP that associates with an IL-18 polypeptide; an IL-1R8 that associates with an IL-1 family polypeptide; an IL-6RA that associates with an IL-6 polypeptide; an IL-6RB (also known as gp130 and CD130) that associates with an IL-6 family polypeptide; a PD-1 that associates with a PD-L1 polypeptide; a PD-1 that associates with a PD-L2 polypeptide; a CTLA-4 that associates with a B7-1 polypeptide; a CTLA-4 that associates with a B7-2 polypeptide; a TIM-3; a Lag3 that associates with an MHCII polypeptide; a BTLA that associates with a HVEM polypeptide; a CD160 that associates with an HVEM polypeptide; a TIGIT that associates with a CD155 polypeptide and/or a CD112 polypeptide; a TACTILE that associates with a CD155 polypeptide and/or a CD111 polypeptide; a CD200R that associates with a CD200 polypeptide; an NKp30c that associates with a B7-H6 polypeptide and/or an HS-GAG polypeptide; a KIR2DL1 that associates with an HLA polypeptide; a KIR2DL2 that associates with an HLA polypeptide; a KIR2DL3 that associates with an HLA polypeptide; a KIR2DL5A that associates with a CD155 polypeptide; a KIR2DL5B that associates with a CD155 polypeptide; a KIR3DL1 that associates with an HLA polypeptide; a KIR3DL2 that associates with an HLA polypeptide; a KIR3DL3; a LILRB1 that associates with an HLA polypeptide; a LILRB2 that associates with an HLA polypeptide; an HLA polypeptide; a LILRB4 that associates with an HLA polypeptide; a LILRB5 that associates with an HLA polypeptide; a CEACAM-1 (also known as CD66a); an NKG2A that associates with an HLA-E polypeptide; a CD94 that associates with an HLA-E polypeptide; a KLRB1 (NKR-PIA) that associates with a carbohydrate; a KLRG1 that associates with an N-cadherin polypeptide; a KLRG1 that associates with an E-cadherin polypeptide; a CD33 that associates with a sialic glycan; a Siglec-7 that associates with a sialic glycan; a Siglec-9 that associates with a sialic glycan; a Siglec-10 that associates with a sialic glycan; a Fas that associates with a FasL polypeptide; or an FCRL6 that associates with an MHCII polypeptide.

[0234] In some embodiments, the extracellular domain comprises the extracellular domain of one or more inhibitory polypeptides presented in Table 1.1. In some embodiments, the extracellular domain comprises an extracellular domain comprising an amino acid sequence having at least 90%, at least 91%, at least 92%, at least 93%, at least 94%, at least 95%, at least 96%, at least 97%, at least 98%, at least 99%, or 100/a identity with the amino acid sequence of any one of SEQ ID NOs: 5-45.

TABLE 1.1
Examples of extracelluar domains

| Inhibitory | UNIPROT | | | Amino acid | SEQ |
|---|---|---|---|---|---|
| receptor | ID | Start | End | length | ID NO: |
| BTLA | Q7Z6A9 | 31 | 157 | 127 | 5 |
| CD160 | O95971 | 25 | 162 | 138 | 6 |
| CD200R | Q8TD46 | 29 | 243 | 215 | 7 |
| CD33 | P20138 | 18 | 259 | 242 | 8 |
| CEACAM-1 (also | P13688 | 35 | 428 | 394 | 9 |
| known as CD66a) | | | | | |
| CTLA-4 | P16410 | 36 | 161 | 126 | 10 |
| Fas | P25445 | 26 | 173 | 148 | 11 |
| FCRL6 | Q6DN72 | 20 | 307 | 288 | 12 |
| IL-10RA | Q13651 | 22 | 235 | 214 | 13 |
| IL-10RB | Q08334 | 20 | 220 | 201 | 14 |
| IL-1R8 | A0A291NLA3 | 1 | 118 | 118 | 15 |
| IL-6RA | P08887 | 20 | 365 | 346 | 16 |
| IL-6RB (also known | P40189 | 23 | 619 | 597 | 17 |
| as gp130 and CD130) | | | | | |
| KIR2DL1 | P43626 | 22 | 245 | 224 | 18 |
| KIR2DL2 | P43627 | 22 | 245 | 224 | 19 |
| KIR2DL3 | P43628 | 22 | 245 | 224 | 20 |
| KIR2DL5A | Q8N109 | 22 | 238 | 217 | 21 |
| KIR2DL5B | Q8NHK3 | 22 | 238 | 217 | 22 |
| KIR3DL1 | P43629 | 22 | 340 | 319 | 23 |
| KIR3DL2 | P43630 | 22 | 340 | 319 | 24 |
| KIR3DL3 | Q8N743 | 26 | 322 | 297 | 25 |
| Lag3 | P18627 | 23 | 450 | 428 | 26 |
| LILRB1 | Q8NHL6 | 24 | 461 | 438 | 27 |
| LILRB2 | Q8N423 | 22 | 461 | 440 | 28 |
| LILRB3 | O75022 | 24 | 443 | 420 | 29 |
| LILRB4 | Q8NHJ6 | 22 | 259 | 238 | 30 |
| LILRB5 | O75023 | 24 | 458 | 435 | 31 |
| NKp30c | O14931-2 | 18 | 135 | 118 | 32 |
| PD-1 | Q15116 | 24 | 170 | 147 | 33 |
| Siglec-10 | Q96LC7 | 17 | 550 | 534 | 34 |
| Siglec-7 | Q9Y286 | 19 | 353 | 335 | 35 |
| Siglec-9 | Q9Y336 | 18 | 348 | 331 | 36 |
| TACTILE (also | P40200 | 22 | 519 | 498 | 37 |
| known as CD96) | | | | | |
| TGF-BR1 (also | P36897 | 34 | 126 | 93 | 38 |
| referred to herein as | | | | | |
| TGF-βR1) | | | | | |
| TGF-BR2 (also | P37173 | 23 | 166 | 144 | 39 |
| referred to herein as | | | | | |
| TGF-βR2) | | | | | |
| TIGIT | Q495A1 | 22 | 141 | 120 | 40 |
| TIM-3 | Q8TDQ0 | 22 | 202 | 181 | 41 |
| CD94 | Q13241 | 1 | 10 | 10 | 42 |
| KLRB1 (also known | Q12918 | 1 | 45 | 45 | 43 |
| as NKR-P1A) | | | | | |
| KLRG1 | Q96E93 | 1 | 38 | 38 | 44 |
| NKG2A | P26715 | 1 | 70 | 70 | 45 |

[0235] 1. Antigen-Binding Domains

[0236] In some embodiments, the engineered protein (e.g., chimeric protein) comprises an antigen-binding domain that specifically binds to a negative signal. In some embodiments, the antigen-binding domain specifically binds to a negative signal selected from the group consisting of transforming growth factor-beta (TGF-β), interleukin (IL) 10 (IL-10), IL-1, IL-6, programmed death-ligand 1 (PD-L1), programmed death-ligand 2 (PD-L2), B7-1, B7-2, MHCI, herpes virus entry mediator (HVEM), cluster of differentiation (CD) 155 (CD155), CD112, CD111, CD200, B7 homolog 6 (B7-H6), heparin and heparan sulfate (collectively referred to as HS-GAG), human leukocyte antigen (HLA) (e.g., HLA-E), N-cadherin, E-cadherin, and Fas ligand (FasL), and major histocompatibility MHCII. In some embodiments, the antigen-binding domain may recognize an epitope comprising the shared space between one or more antigens.

[0237] In some embodiments of any of the antigen-binding domains described herein, the antigen-binding domain can comprise an antibody or an antigen-binding fragment thereof. In some embodiments of any of the antigen-binding domains described herein, the antigen-binding domain comprises a single-chain antibody fragment (scFv) comprising a light chain variable domain (VL) and heavy chain variable domain (VH) of a monoclonal antibody. In some embodiments of any of the antigen-binding domains described herein, the scFv is human or humanized. In some embodiments of any of the antigen-binding domains described herein, the antigen-binding domain may comprise VH and VL that are directionally linked, for example, from N- to C-terminus, VH-linker-VL or VL-linker-VH. In some embodiments, the antigen-binding domain comprises complementary determining regions of a monoclonal antibody, variable regions of a monoclonal antibody, an scFv, a single domain antibody (e.g., a camelid single domain antibody), an antibody mimetic and/or antigen-binding fragments thereof. In some embodiments, the antigen-binding domain comprises an aptamer. In some embodiments, the antigen-binding domain comprises a T cell receptor (TCR)-like antibody. In some embodiments, the antigen-binding domain comprises a humanized amino acid sequence. Almost anything that binds a given negative signal with high affinity can be used as the antigen-binding domain. The arrangement of the extracellular domain can be multimeric, such as a diabody or multimeric (e.g., multimers). In some embodiments, the multimers can be formed by cross pairing of the variable portion of the light and heavy chains into a diabody.

[0238] Additional examples of extracellular domains that may be included in the engineered proteins (e.g., chimeric proteins) described herein are provided below:

[0239] 2. Extracellular Domains Capable of Binding TGF-β

[0240] In some embodiments, the extracellular domain of an engineered protein (e.g., chimeric protein) described herein is capable of binding a TGF-β polypeptide.

[0241] In some embodiments, an engineered protein (e.g., chimeric protein) provided herein comprises an extracellular domain of a TGF-β receptor 2 (TGF-BR2) polypeptide, or a fragment or portion thereof. In some embodiments, an engineered protein (e.g., chimeric protein) provided herein comprises an extracellular domain of a TGF-BR2 polypeptide comprising the amino acid sequence of SEQ ID NO: 46 or an amino acid sequence that is at least 80%, at least 85%, at least 90%, at least 91%, at least 92%, at least 93%, at least 94%, at least 95%, at least 96%, at least 97%, at least 98%, or at least 99% to the amino acid sequence of SEQ ID NO: 46. In some embodiments, an engineered protein (e.g., chimeric protein) provided herein comprises an extracellular domain of a TGF-BR2 polypeptide comprising a fragment or portion of an amino acid sequence that is at least 80%, at least 85%, at least 90%, at least 91%, at least 92%, at least 93%, at least 94%, at least 95%, at least 96%, at least 97%, at least 98%, at least 99% or at least 100% identical to the amino acid sequence of SEQ ID NO: 46.

[0242] In some embodiments, an engineered protein (e.g., chimeric protein) provided herein comprises an extracellular domain of a TGF-β receptor 1 (TGF-BR1) polypeptide, or a fragment or portion thereof. In some embodiments, an engineered protein (e.g., chimeric protein) provided herein comprises an extracellular domain of a TGF-BR1 polypeptide comprising the amino acid sequence of SEQ ID NO: 47, or an amino acid sequence that is at least 80%, at least 85%, at least 90%, at least 91%, at least 92%, at least 93%, at least 94%, at least 95%, at least 96%, at least 97%, at least 98%, or at least 99% identical to the amino acid sequence of SEQ ID NO: 47. In some embodiments, an engineered protein (e.g., chimeric protein) provided herein comprises an extracellular domain of a TGF-BR1 polypeptide comprising a fragment or portion of an amino acid sequence that is at least 80%, at least 85%, at least 90%, at least 91%, at least 92%, at least 93%, at least 94%, at least 95%, at least 96%, at least 97%, at least 98%, at least 99% or at least 100% identical to the amino acid sequence of SEQ ID NO: 47.

[0243] In some embodiments, an engineered protein (e.g., chimeric protein) provided herein comprises an extracellular domain comprising an antigen-binding domain that specifically binds TGF-B. The antigen-binding domain can comprise a fragment of the VH and VL chains of a single-chain variable fragment (scFv) that specifically bind a TGF-B polypeptide such as those described in WO 2005/097832, WO 2012/167143, WO 2006/086469, WO 2007/076391, and WO 2014/164709; or U.S. Pat. Nos. 10,035,851; 5,772,998, and 8,597,646, each of which is incorporated herein by reference in its entirety.

[0244] 3. Extracellular Domains Capable of Binding IL-10

[0245] In some embodiments, the extracellular domain of an engineered protein (e.g., chimeric protein) described herein is capable of binding an IL-10 polypeptide. In some embodiments, the extracellular domain comprises the extracellular domain, or a fragment or portion thereof, of an IL-10RA polypeptide. In some embodiments, the extracellular domain comprises an antigen-binding domain that specifically binds IL-10.

[0246] 4. Extracellular Domains Capable of Binding HLA

[0247] In some embodiments, the extracellular domain of an engineered protein (e.g., chimeric protein) described herein is capable of binding an HLA polypeptide. In some embodiments, the extracellular domain comprises the extracellular domain, or a portion thereof, of an inhibitory KIR polypeptide (e.g., KIR2DL1, KIR2DL2, KIR2DL3, KIR2DL5A, KIR2DL55, or KIR3DL1). In some embodiments, the extracellular domain comprises the extracellular domain, or a portion thereof, of LILRB1, LILRB2, LILRB3, LILRB4, or LILRB5. In some embodiments, the extracellular domain comprises an antigen-binding domain that specifically binds HLA CD155.

[0248] 5. Extracellular Domains Capable of Binding CD112 and/or CD155

[0249] In some embodiments, the extracellular domain of an engineered protein (e.g., chimeric protein) described herein is capable of binding a CD112 and/or CD155 polypeptide. In some embodiments, the extracellular domain comprises the extracellular domain, or a portion thereof, of a TIGIT polypeptide.

[0250] In some embodiments, the extracellular domain comprises an antigen-binding domain that specifically binds CD112 and/or CD155.

[0251] 6. Extracellular Domains Capable of Binding HLA-E

[0252] In some embodiments, the extracellular domain of an engineered protein (e.g., chimeric protein) described herein is capable of binding an HLA-E polypeptide. In some embodiments, the extracellular domain comprises the extracellular domain, or a portion thereof, of an NKG2A polypeptide. In some embodiments, the extracellular domain comprises an antigen-binding domain that specifically binds HLA-E.

[0253] 7. Extracellular Domains Capable of Binding N-Cadherin and/or E-Cadherin

[0254] In some embodiments, the extracellular domain of an engineered protein (e.g., chimeric protein) described herein is capable of binding an N-cadherin and/or E-cadherin polypeptide. In some embodiments, the extracellular domain comprises the extracellular domain, or a portion thereof, of a KLRG1 polypeptide.

[0255] In some embodiments, the extracellular domain comprises an antigen-binding domain that specifically binds N-cadherin and/or E-cadherin.

[0256] 8. Extracellular Domains Capable of Binding IL-18

[0257] In some embodiments, the extracellular domain of an engineered protein (e.g., chimeric protein) described herein is capable of binding an IL-18 polypeptide. In some embodiments, the extracellular domain comprises the extracellular domain, or a portion thereof, of an IL-18BP polypeptide.

[0258] In some embodiments, the extracellular domain comprises an antigen-binding domain that specifically binds IL-18.

[0259] B. Intracellular Domains

[0260] In some embodiments, an intracellular domain comprised in an engineered protein (e.g., chimeric protein) of the disclosure comprises the intracellular domain, or a portion thereof, of a stimulatory polypeptide. In some embodiments, the engineered protein (e.g., chimeric protein) comprises the intracellular domain, or a portion thereof, of two or more different stimulatory polypeptides. In some embodiments, the engineered protein (e.g., chimeric protein) comprises the intracellular domain, or a portion thereof, of three or more different stimulatory polypeptides. In some embodiments, the intracellular domain comprises the intracellular domain, or a portion thereof, of a stimulatory polypeptide selected from the stimulatory polypeptides presented in Table 2.

TABLE 2
Examples of Intracellular Domains

| Stimulatory Polypeptide | UNIPROT ID | Isoform(s) | Class |
|---|---|---|---|
| Caspase recruitment domain-containing protein 11 | Q9BXL7 | 1 | Adaptor |
| (also known as CARD11 and Carma 1) | | | |
| Hematopoietic cell signal transducer (also known as | Q9UBK5 | 1 | Adaptor |
| DNAX-Activation Protein 10 and DAP10) | | | |
| Linker for activation of T-cells family member 1 | O43561 | 1, 2, 3, 4, 5 | Adaptor |
| (LAT) | | | |
| Linker for activation of T-cells family member 2 | Q9GZY6 | 1 | Adaptor |
| (also known as LAT2, NTAL, and LAB) | | | |
| Lymphocyte cytosolic protein 2 (also known as | Q13094 | 1 | Adaptor |
| SLP76) | | | |
| Lymphocyte transmembrane adapter 1 (also known | Q8IWV1 | 1 | Adaptor |
| as LAX) | | | |
| Myeloid differentiation primary response protein | Q99836 | 1, 2, 4, 6, 8 | Adaptor |
| MyD88 (also known as MyD88) | | | |
| Phosphoprotein associated with glycosphingolipid- | Q9NWQ8 | 1 | Adaptor |
| enriched microdomains 1 (also known as PAG and | | | |
| CBP) | | | |
| Protein GAPT (also known as GAPT, and Growth | Q8N292 | 1 | Adaptor |
| Factor Receptor-Bound Protein 2-Binding Adapter | | | |
| Protein, Transmembrane) | | | |
| SH2 domain-containing protein lA (also known as | O60880 | A, B, C, D, | Adaptor |
| SAP) | | E, F | |
| SH2 domain-containing protein 1B (also known as | O14796 | 1, 2 | Adaptor |
| EAT-2) | | | |
| TYRO protein tyrosine kinase-binding protein (also | O43914 | 1 | Adaptor |
| known as DNAX-Activation Protein 12 and DAP12 | | | |
| High affinity immunoglobulin epsilon receptor | P30273 | 1 | Antibody |
| subunit gamma (also known as FcRgamma and | | | receptor |
| FceRI gamma) | | | |
| High affinity immunoglobulin gamma Fc receptor I | P12314 | 1 | Antibody |
| (also known as FcRI, Fc-gamma RI, and CD64A) | | | receptor |
| Low affinity immunoglobulin gamma Fc region | P12318 | 1, 3 | Antibody |
| receptor II-a (also known as FcRII-a,Fc-gamma | | | receptor |
| RIIa, and CD32A) | | | |
| Low affinity immunoglobulin gamma Fc region | P31995 | 1, 2, 3, 4, 5 | Antibody |
| receptor II-c (also known as FcRII-c, Fc-gamma | | | receptor |
| RIIc, and CD32C) | | | |
| Low affinity immunoglobulin gamma Fc region | P08637 | 1 | Antibody |
| receptor III-A (also known as FcRIIIa, Fc-gamma | | | receptor |
| RIIIa, and CD16A) | | | |
| Lymphocyte function-associated antigen 3 (also | P19256 | 1 | CD2 family |
| known as LFA-3 and CD58) | | | receptor |
| Natural killer cell receptor 2B4 (also known as 2B4, | Q9BZW8 | 1, 3 | CD2 family |
| SLAMF4, and CD244) | | | receptor |
| Signaling lymphocytic activation molecule (also | Q13291 | 1, 2, 4 | CD2 family |
| known as SLAM, SLAMF1 and CD150) | | | receptor |
| SLAM family member 5 (also known as SLAMF5 | Q9UIB8 | 1, 2, 3, 4, | CD2 family |
| and CD84) | | 5, 7 | receptor |
| SLAM family member 6 (also known as SLAMF6, | Q96DU3 | 1 | CD2 family |
| NTB-A, and CD352) | | | receptor |
| SLAM family member 7 (also known as SLAMF7 | Q9NQ25 | 1, 3, 5 | CD2 family |
| and CD319) | | | receptor |
| T-cell surface antigen CD2 (also known as LFA-2 | P06729 | 1 | CD2 family |
| and CD2) | | | receptor |
| T-lymphocyte surface antigen Ly-9 (also known as | Q9HBG7 | 1, 2, 3 | CD2 family |
| SLAMF3, Ly-9, and CD229) | | | receptor |
| Carcinoembryonic antigen-related cell adhesion | P40198 | 1, 2, 3 | CEACAM |
| molecule 3 (also known as CEACAM-3 and | | | family |
| CD66D) | | | |
| CD209 antigen (also known as DC-SIGN, CLEC- | Q9NNX6 | 1, 5 | C-type lectin |
| 4L, and CD209) | | | family receptor |
| C-type lectin domain family 1 member B (also | Q9P126 | 1 | C-type lectin |
| known as CLEC-2) | | | family receptor |
| C-type lectin domain family 7 member A (also | Q9BXN2 | 1 | C-type lectin |
| known as Dectin-1 and CLEC-7A) | | | family receptor |
| C-type lectin domain family 9 member A (also | Q6UXN8 | 1 | C-type lectin |
| known as DNGR-1 and CD370) | | | family receptor |
| Killer cell lectin-like receptor subfamily F member | Q9NZS2 | 1 | C-type lectin |
| 1 (also known as NKp80, KLRF1 and CLEC5C) | | | family receptor |
| Killer cell lectin-like receptor subfamily F member | D3W0D1 | 1 | C-type lectin |
| 2 (also known as NKp65 and KLRF2) | | | family receptor |
| NKG2-C type II integral membrane protein (also | P26717 | 1 | C-type lectin |
| known as NKG2C, KLRC2, CD159C) | | | family receptor |
| NKG2-D type II integral membrane protein (also | P26718 | 1 | C-type lectin |
| known as NKG2D and CD314) | | | family receptor |
| NKG2-E type II integral membrane protein (also | Q07444 | 1 (E) | C-type lectin |
| known as NKG2E and KLRC3) | | | family receptor |
| Cytokine receptor common subunit beta (also | P32927 | 1 | Cytokine |
| known as CD131) | | | receptor |
| Cytokine receptor common subunit gamma (also | P31785 | 1 | Cytokine |
| known as IL-2RG and CD132) | | | receptor |
| Cytokine receptor-like factor 2 (also known as | Q9HC73 | 1 | Cytokine |
| TSLP-R) | | | receptor |
| Erythropoietin receptor (also known as EPO-R or | P19235 | 1 | Cytokine |
| EPOR) | | | receptor |
| Granulocyte colony-stimulating factor receptor (also | Q99062 | 1, 2, 3, 4 | Cytokine |
| known as G-CSF-R, GCSFR, and CD114) | | | receptor |
| Granulocyte-macrophage colony-stimulating factor | P15509 | 1, 2 | Cytokine |
| receptor subunit alpha (also known as GM-CSF-R- | | | receptor |
| alpha and CD116) | | | |
| Interferon alpha/beta receptor 1 (also known as IFN- | P17181 | 1 | Cytokine |
| R1 and IFNA/B-R1) | | | receptor |
| Interferon alpha/beta receptor 2 (also known as IFN- | P48551 | 1 | Cytokine |
| R2 and IFNA/B-R2) | | | receptor |
| Interferon lambda receptor 1 (also known as IL- | Q8IU57 | 1, 2 | Cytokine |
| 28RA and IFN-lambda-R1 | | | receptor |
| Interleukin-1 receptor accessory protein (also | Q9NPH3 | 1, 4 | Cytokine |
| known as IL-1R3 and IL-1RAP) | | | receptor |
| Interleukin-1 receptor type 1 (also known as IL- | P14778 | 1 | Cytokine |
| 1R1, IL-1RA, and CD121A) | | | receptor |
| Interleukin-1 receptor-like 1 (also known as ST2 | Q01638 | 1 | Cytokine |
| and IL-1RL1) | | | receptor |
| Interleukin-1 receptor-like 2 (also known as IL-36R | Q9HB29 | 1 | Cytokine |
| and IL-1RL2 | | | receptor |
| Interleukin-11 receptor subunit alpha (also known | Q14626 | 1 | Cytokine |
| as IL-11RA) | | | receptor |
| Interleukin-12 receptor subunit beta-1 (also known | P42701 | 1 | Cytokine |
| as IL-12RB1 and CD212) | | | receptor |
| Interleukin-12 receptor subunit beta-2 (also known | Q99665 | 1 | Cytokine |
| as IL-12RB2) | | | receptor |
| Interleukin-17 receptor A (also known as IL-17RA | Q96F46 | 1 | Cytokine |
| and CD217) | | | receptor |
| Interleukin-17 receptor B (also known as IL-17RB) | Q9NRM6 | 1 | Cytokine |
| | | | receptor |
| Interleukin-17 receptor C (also known as IL-17RC) | Q8NAC3 | 1 | Cytokine |
| | | | receptor |
| Interleukin-17 receptor E (also known as IL-17RE) | Q8NFR9 | 1 | Cytokine |
| | | | receptor |
| Interleukin-18 receptor 1 (also known as IL-18R1, | Q13478 | 1 | Cytokine |
| IL-1RRP and CD218A) | | | receptor |
| Interleukin-18 receptor accessory protein (also | O95256 | 1 | Cytokine |
| known as IL-18RB, IL-1-R7, and CD218B) | | | receptor |
| Interleukin-2 receptor subunit beta (also known as | P14784 | 1 | Cytokine |
| IL-2RB, IL-15RB, and CD122) | | | receptor |
| Interleukin-21 receptor (also known as IL-21R and | Q9HBE5 | 1 | Cytokine |
| CD360) | | | receptor |
| Interleukin-22 receptor subunit alpha-1 (also known | Q8N6P7 | 1 | Cytokine |
| as IL-22RA1) | | | receptor |
| Interleukin-23 receptor (also known as IL-23R) | Q5VWK5 | 1 | Cytokine |
| | | | receptor |
| Interleukin-27 receptor subunit alpha (also known | Q6UWB1 | 1 | Cytokine |
| as IL-27RA and WSX-1) | | | receptor |
| Interleukin-3 receptor subunit alpha (also known as | P26951 | 1 | Cytokine |
| IL-3RA and CD123) | | | receptor |
| Interleukin-6 receptor subunit beta (also known as | P40189 | 1 | Cytokine |
| IL-6RB, gp130, and CD130) | | | receptor |
| Interleukin-7 receptor subunit alpha (also known as | P16871 | 1 | Cytokine |
| IL-7RA and CD127) | | | receptor |
| Leukemia inhibitory factor receptor (also known as | P42702 | 1 | Cytokine |
| LIF-R and CD118) | | | receptor |
| Macrophage colony-stimulating factor 1 receptor | P07333 | 1 | Cytokine |
| (also known as M-CSF-R, CSF-1R, CSF1R, and | | | receptor |
| CD115) | | | |
| Oncostatin-M-specific receptor subunit beta (also | Q99650 | 1 | Cytokine |
| known as OSM-RB and IL-31RB) | | | receptor |
| Epidermal growth factor receptor (also known as | P00533 | 1 | Growth factor |
| EGFR and Hen) | | | receptor |
| Growth hormone receptor (also known as GHR and | P10912 | 1 | Growth factor |
| GH receptor) | | | receptor |
| Insulin receptor (also known as IR and CD220) | P06213 | Beta chain | Growth factor |
| | | | receptor |
| Leptin receptor (also known as LEP-R, OB-R and | P48357 | a, b, c, d, f | Growth factor |
| CD295) | | | receptor |
| Prolactin receptor (also known as PRL-R) | P16471 | 1 | Growth factor |
| | | | receptor |
| Thrombopoietin receptor (also known as TPO-R, c- | P40238 | 1, 2 | Growth factor |
| Mpl, and CD110) | | | receptor |
| B-cell antigen receptor complex-associated protein | P11912 | 1 | Ig family |
| alpha chain (also known as Ig-alpha and CD79A) | | | receptor |
| B-cell antigen receptor complex-associated protein | P40259 | 1 | Ig family |
| beta chain (also known as Ig-beta and CD79B) | | | receptor |
| CD226 antigen (also known as DNAM-1 and | Q15762 | 1 | Ig family |
| CD226) | | | receptor |
| CD83 antigen (also known as CD83) | Q01151 | 1 | Ig family |
| | | | receptor |
| Inducible T-cell costimulator (also known as ICOS | Q9Y6W8 | 1 | Ig family |
| and CD278) | | | receptor |
| Intercellular adhesion molecule 1 (also known as | P05362 | 1 | Ig family |
| ICAM-1 and CD54) | | | receptor |
| Intercellular adhesion molecule 2 (also known as | P13598 | 1 | Ig family |
| ICAM-2 and CD102) | | | receptor |
| Intercellular adhesion molecule 3 (also known as | P32942 | 1 | Ig family |
| ICAM-3 and CD50) | | | receptor |
| Killer cell immunoglobulin-like receptor 2DL4 (also | Q99706 | 1 | Ig family |
| known as KIR2DL4 and CD158D) | | | receptor |
| Killer cell immunoglobulin-like receptor 2DS1 (also | Q14954 | 1 | Ig family |
| known as KIR2DS1 and CD158H) | | | receptor |
| Killer cell immunoglobulin-like receptor 2DS2 (also | P43631 | 1 | Ig family |
| known as KIR2DS2 and CD158J) | | | receptor |
| Killer cell immunoglobulin-like receptor 2DS3 (also | Q14952 | 1 | Ig family |
| known as KIR2DS3) | | | receptor |
| Killer cell immunoglobulin-like receptor 2DS4 (also | P43632 | 1 | Ig family |
| known as KIR2DS4 and CD158I) | | | receptor |
| Killer cell immunoglobulin-like receptor 2DS50 | Q14953 | 1 | Ig family |
| (also known as KIR2DS5 and CD158G) | | | receptor |
| Killer cell immunoglobulin-like receptor 3DS1 (also | Q14943 | 1 | Ig family |
| known as KIR3DS1) | | | receptor |
| Natural cytotoxicity triggering receptor 1 (also | O76036 | 1 | Ig family |
| known as NKp46, Ly94 and CD335) | | | receptor |
| Natural cytotoxicity triggering receptor 2 (also | O95944 | 1, 2, 3 | Ig family |
| known as NKp44 and CD336) | | | receptor |
| Natural cytotoxicity triggering receptor 3 (also | O14931 | 1, 2, 3 | Ig family |
| known as NKp30 and CD337) | | | receptor |
| T-cell antigen CD7 (also known as CD7) | P09564 | 1 | Ig family |
| | | | receptor |
| T-cell surface glycoprotein CD4 (also known as | P01730 | 1 | Ig family |
| CD4) | | | receptor |
| T-cell-specific surface glycoprotein CD28 (also | P10747 | 1 | Ig family |
| known as CD28) | | | receptor |
| Transmembrane and immunoglobulin domain- | Q96BF3 | 1, 2 | Ig family |
| containing protein 2 (also known as TMIGD2, | | | receptor |
| CD28H, and IGPR-1) | | | |
| Integrin alpha-L (also known as LFA-1A and | P20701 | 1 | Integrin |
| CD11A) | | | |
| Integrin beta-2 (also known as LFA-1B and CD18) | P05107 | 1 | Integrin |
| Cytotoxic and regulatory T-cell molecule (also | O95727 | 1 | Nectin family |
| known as CRTAM and CD355) | | | receptor |
| B-cell receptor CD22 (also known as Siglec-2 and | P20273 | 1, 4 | Siglec lectin |
| CD22) | | | family receptor |
| T-cell surface glycoprotein CD3 epsilon chain (also | P07766 | 1 | Src family |
| known as CD3E) | | | tyrosine kinase |
| T-cell surface glycoprotein CD3 gamma chain (also | P09693 | 1 | Src family |
| known as CD3G) | | | tyrosine kinase |
| T-cell surface glycoprotein CD3 zeta chain (also | P20963 | 1 | Src family |
| known as CD3Z, CD3ζ, and CD247) | | | tyrosine kinase |
| Tyrosine-protein kinase Lck (also known as Lck, | P06239 | 1, 2, 3 | Src family |
| p56Lck, and LSK) | | | tyrosine kinase |
| Tyrosine-protein kinase ZAP-70 (also known as | P43403 | 1, 2, 3 | Syk family |
| ZAP70) | | | tyrosine kinase |
| Hepatitis A virus cellular receptor 1 (also known as | Q96D42 | 1 | TIM receptor |
| TIM-1, KIM-1, and CD365) | | | family |
| Toll-like receptor 1 (also known as TLR1 and | Q15399 | 1 | Toll-like |
| CD281) | | | receptor (TLR) |
| | | | family |
| Toll-like receptor 10 (also known as TLR10 and | Q9BXR5 | 1 | TLR family |
| CD290) | | | |
| Toll-like receptor 2 (also known as TLR2 and | O60603 | 1 | TLR family |
| CD282) | | | |
| Toll-like receptor 3 (also known as TLR3 and | O15455 | 1 | TLR family |
| CD283) | | | |
| Toll-like receptor 4 (also known as TLR4 and | O00206 | 1 | TLR family |
| CD284) | | | |
| Toll-like receptor 5 (also known as TLR5 and) | O60602 | 1 | TLR family |
| CD285 | | | |
| Toll-like receptor 6 (also known as TLR6 and | Q9Y2C9 | 1 | TLR family |
| CD286) | | | |
| Toll-like receptor 7 (also known as TLR7 and | Q9NYK1 | 1 | TLR family |
| CD287) | | | |
| Toll-like receptor 8 (also known as TLR8 and | Q9NR97 | 1 | TLR family |
| CD288) | | | |
| Toll-like receptor 9 (also known as TLR9 and | Q9NR96 | 1 | TLR family |
| CD289) | | | |
| CD27 antigen (also known as CD27) | P26842 | 1 | TNF family |
| | | | receptor |
| CD70 antigen (also known as CD70) | P32970 | 1 | TNF family |
| | | | receptor |
| Tumor necrosis factor ligand superfamily member | O43557 | 1 | TNF family |
| 14 (also known as LIGHT and CD258) | | | receptor |
| Tumor necrosis factor ligand superfamily member 8 | P32971 | 1 | TNF family |
| (also known as CD3OL and CD153) | | | receptor |
| Tumor necrosis factor receptor superfamily member | Q9Y6Q6 | 1, 2, 3, 4, 5 | TNF family |
| 11A (also known as TNFRSF11A, RANK, and | | | receptor |
| CD265) | | | |
| Tumor necrosis factor receptor superfamily member | Q9NP84 | 1 | TNF family |
| 12A (also known as TNFRSF12A, TweakR, FN14, | | | receptor |
| and CD266) | | | |
| Tumor necrosis factor receptor superfamily member | O14836 | 1 | TNF family |
| 13B (also known as TNFRSF13B, TACT, and | | | receptor |
| CD267) | | | |
| Tumor necrosis factor receptor superfamily member | Q96RJ3 | 1 | TNF family |
| 13C (also known as TNFRSF13C, BAFF-R, and | | | receptor |
| CD268) | | | |
| Tumor necrosis factor receptor superfamily member | Q92956 | 1 | TNF family |
| 14 (also known as TNFRSF14, HVEM, and CD270) | | | receptor |
| Tumor necrosis factor receptor superfamily member | P08138 | 1 | TNF family |
| 16 (also known as TNFRSF16, NGF-R, p75NTR, | | | receptor |
| and CD271) | | | |
| Tumor necrosis factor receptor superfamily member | Q02223 | 1 | TNF family |
| 17 (also known as TNFRSF17, BCMA, and CD269) | | | receptor |
| Tumor necrosis factor receptor superfamily member | Q9Y5U5 | 1, 2, 3 | TNF family |
| 18 (also known as TNFRSF18, GITR, and CD357) | | | receptor |
| Tumor necrosis factor receptor superfamily member | Q9NS68 | 1, 2 | TNF family |
| 19 (also known as TNFRSF19, TROY, and | | | receptor |
| TRADE) | | | |
| Tumor necrosis factor receptor superfamily member | Q969Z4 | 1 | TNF family |
| 19L (also known as TNFRSF19L and RELT) | | | receptor |
| Tumor necrosis factor receptor superfamily member | P19438 | 1 | TNF family |
| lA (also known as TNFRS1A, TNF-RI, and | | | receptor |
| CD120A) | | | |
| Tumor necrosis factor receptor superfamily member | P20333 | 1 | TNF family |
| 1B (also known as TNFRSF1B, TNF-RII, and | | | receptor |
| CD120B) | | | |
| Tumor necrosis factor receptor superfamily member | Q93038 | 1 | TNF family |
| 25 (also known as TNFRSF25, DR3, and TRAMP) | | | receptor |
| Tumor necrosis factor receptor superfamily member | Q9HAV5 | 1, 2, 3 | TNF family |
| 27 (also known as TNFRSF27, XEDAR, and EDA- | | | receptor |
| A2 receptor) | | | |
| Tumor necrosis factor receptor superfamily member | P36941 | 1 | TNF family |
| 3 (also known as TNFRSF3, LTB-R, and TNF-RIII) | | | receptor |
| Tumor necrosis factor receptor superfamily member | P43489 | 1 | TNF family |
| 4 (also known as TNFRSF4, OX-40, and CD134) | | | receptor |
| Tumor necrosis factor receptor superfamily member | P25942 | 1 | TNF family |
| 5 (also known as TNFRSF5 and CD40) | | | receptor |
| Tumor necrosis factor receptor superfamily member | P28908 | 1 | TNF family |
| 8 (also known as TNFRSF8 and CD30) | | | receptor |
| Tumor necrosis factor receptor superfamily member | Q07011 | 1 | TNF family |
| 9 (also known as TNFRSF9, 4-1BB and CD137) | | | receptor |
| Tumor necrosis factor receptor superfamily member | Q9UNE0 | 1 | TNF family |
| EDAR (also known as EDAR) | | | receptor |
| Paired immunoglobulin-like type 2 receptor beta | Q9UKJ0 | 1, 2, 3 | Ig family |
| (also known as PILRB) | | | receptor |

[0261] In some embodiments, an engineered protein (e.g., chimeric protein) provided herein includes an intracellular domain comprising an intracellular domain, or a portion thereof, of one or more isoforms of the stimulatory polypeptides listed in Table 2.

[0262] In some embodiments, an engineered protein (e.g., chimeric protein) provided herein includes an intracellular domain comprising an intracellular domain, or a portion thereof, of a class of stimulatory polypeptide (e.g., as described in Table 2). For example, in some embodiments, the intracellular domain comprises at least a portion of the intracellular domain of: an adaptor polypeptide, an antibody receptor polypeptide, a CD2 family receptor polypeptide, a CEACAM family polypeptide, a C-type lectin family receptor polypeptide, a cytokine receptor polypeptide, a growth factor receptor polypeptide, an Ig family receptor polypeptide, an integrin polypeptide, a nectin family receptor polypeptide, a siglec lectin family receptor polypeptide, a src family tyrosine kinase polypeptide, a syk family tyrosine kinase polypeptide, a TIM receptor family polypeptide, a TLR family polypeptide, or a TNF family receptor polypeptide. Non-limiting examples of these polypeptides are listed in Table 2.

[0263] In some embodiments, the intracellular domain of an engineered protein (e.g., chimeric protein) disclosed herein is responsible for activation of at least one of the normal effector functions of the immune cell (e.g., NK cell) in which the engineered protein (e.g., chimeric protein) has been expressed. In some embodiments, the intracellular domain comprises a signaling domain for NK cell activation. In some embodiments, an engineered protein (e.g., chimeric protein) provided herein includes at least one (e.g., one, two, three, four, or five) intracellular domain of one or more of the polypeptides selected from the group consisting of: caspase recruitment domain-containing protein 11, hematopoietic cell signal transducer, linker for activation of T-cells family member 1, linker for activation of T-cells family member 2, lymphocyte cytosolic protein 2, lymphocyte transmembrane adapter 1, myeloid differentiation primary response protein MyD88, phosphoprotein associated with glycosphingolipid-enriched microdomains 1, protein GAPT, SH2 domain-containing protein 1A, SH2 domain-containing protein 1B, TYRO protein tyrosine kinase-binding protein, high affinity immunoglobulin epsilon receptor subunit gamma, high affinity immunoglobulin gamma Fc receptor I, low affinity immunoglobulin gamma Fc region receptor II-a, low affinity immunoglobulin gamma Fc region receptor II-c, low affinity immunoglobulin gamma Fc region receptor III-A, lymphocyte function-associated antigen 3, natural killer cell receptor 2B4, signaling lymphocytic activation molecule, SLAM family member 5, SLAM family member 6, SLAM family member 7, T-cell surface antigen CD2, T-lymphocyte surface antigen Ly-9, carcinoembryonic antigen-related cell adhesion molecule 3, CD209 antigen, C-type lectin domain family 1 member B, C-type lectin domain family 7 member A, C-type lectin domain family 9 member A, killer cell lectin-like receptor subfamily F member 1, killer cell lectin-like receptor subfamily F member 2, NKG2-C type II integral membrane protein, NKG2-D type II integral membrane protein, NKG2-E type II integral membrane protein, cytokine receptor common subunit beta, cytokine receptor common subunit gamma, cytokine receptor-like factor 2, erythropoietin receptor, granulocyte colony-stimulating factor receptor, granulocyte-macrophage colony-stimulating factor receptor subunit alpha, interferon alpha/beta receptor 1, interferon alpha/beta receptor 2, interferon lambda receptor 1, interleukin-1 receptor accessory protein, interleukin-1 receptor type 1, interleukin-1 receptor-like 1, interleukin-1 receptor-like 2, interleukin-11 receptor subunit alpha, interleukin-12 receptor subunit beta-1, interleukin-12 receptor subunit beta-2, interleukin-17 receptor A, interleukin-17 receptor B, interleukin-17 receptor C, interleukin-17 receptor E, interleukin-18 receptor 1, interleukin-18 receptor accessory protein, interleukin-2 receptor subunit beta, interleukin-21 receptor, interleukin-22 receptor subunit alpha-1, interleukin-23 receptor, interleukin-27 receptor subunit alpha, interleukin-3 receptor subunit alpha, interleukin-6 receptor subunit beta, interleukin-7 receptor subunit alpha, leukemia inhibitory factor receptor, macrophage colony-stimulating factor 1 receptor, oncostatin-M-specific receptor subunit beta, epidermal growth factor receptor, growth hormone receptor, insulin receptor, leptin receptor, prolactin receptor, thrombopoietin receptor, B-cell antigen receptor complex-associated protein alpha chain, B-cell antigen receptor complex-associated protein beta chain, CD226 antigen, CD83 antigen, inducible T-cell costimulatory, intercellular adhesion molecule 1, intercellular adhesion molecule 2, intercellular adhesion molecule 3, killer cell immunoglobulin-like receptor 2DL4, killer cell immunoglobulin-like receptor 2DS1, killer cell immunoglobulin-like receptor 2DS2, killer cell immunoglobulin-like receptor 2DS3, killer cell immunoglobulin-like receptor 2DS4, killer cell immunoglobulin-like receptor 2DS50, killer cell immunoglobulin-like receptor 3DS1, natural cytotoxicity triggering receptor 1, natural cytotoxicity triggering receptor 2, natural cytotoxicity triggering receptor 3, T-cell antigen CD7, T-cell surface glycoprotein CD4, T-cell-specific surface glycoprotein CD28, transmembrane and immunoglobulin domain-containing protein 2, integrin alpha-L, integrin beta-2, cytotoxic and regulatory T-cell molecule, B-cell receptor CD22, T-cell surface glycoprotein CD3 epsilon chain, T-cell surface glycoprotein CD3 gamma chain, T-cell surface glycoprotein CD3 zeta chain, tyrosine-protein kinase Lck, tyrosine-protein kinase ZAP-70, Hepatitis A virus cellular receptor 1, Toll-like receptor 1, Toll-like receptor 10, Toll-like receptor 2, Toll-like receptor 3, Toll-like receptor 4, Toll-like receptor 5, Toll-like receptor 6, Toll-like receptor 7, Toll-like receptor 8, Toll-like receptor 9, CD27 antigen, CD70 antigen, tumor necrosis factor ligand superfamily member 14, tumor necrosis factor ligand superfamily member 8, tumor necrosis factor receptor superfamily member 11A, tumor necrosis factor receptor superfamily member 12A, tumor necrosis factor receptor superfamily member 13B, tumor necrosis factor receptor superfamily member 13C, tumor necrosis factor receptor superfamily member 14, tumor necrosis factor receptor superfamily member 16, tumor necrosis factor receptor superfamily member 17, tumor necrosis factor receptor superfamily member 18, tumor necrosis factor receptor superfamily member 19, tumor necrosis factor receptor superfamily member 19L, tumor necrosis factor receptor superfamily member 1A, tumor necrosis factor receptor superfamily member 1B, tumor necrosis factor receptor superfamily member 25, tumor necrosis factor receptor superfamily member 27, tumor necrosis factor receptor superfamily member 3, tumor necrosis factor receptor superfamily member 4, tumor necrosis factor receptor superfamily member 5, tumor necrosis factor receptor superfamily member 8, tumor necrosis factor receptor superfamily member 9, and tumor necrosis factor receptor superfamily member EDAR, or a portion of any of the foregoing.

[0264] In some embodiments, an engineered protein (e.g., chimeric protein) provided herein comprises an intracellular domain, or a portion thereof, of: a CD226 polypeptide, a natural cytotoxicity triggering receptor 1 polypeptide, a CD160 polypeptide, a hematopoietic cell signal transducer polypeptide, a TYRO protein tyrosine kinase-binding protein polypeptide, a myeloid differentiation primary response protein MyD88 polypeptide, a granulocyte colony-stimulating factor receptor polypeptide, a macrophage colony-stimulating factor 1 receptor polypeptide, an erythropoietin receptor polypeptide, an inducible T-cell costimulatory polypeptide, a T-cell-specific surface glycoprotein CD28 polypeptide, a transmembrane and immunoglobulin domain-containing protein 2 polypeptide, a tumor necrosis factor receptor superfamily member 9 polypeptide, a tumor necrosis factor receptor superfamily member 25 polypeptide, a tumor necrosis factor receptor superfamily member 4 polypeptide, a low affinity immunoglobulin gamma Fc region receptor III-A polypeptide, a low affinity immunoglobulin gamma Fc region receptor II-c polypeptide, a high affinity immunoglobulin epsilon receptor subunit gamma polypeptide, a T-cell surface antigen CD2 polypeptide, a natural killer cell receptor 2B4 polypeptide, a SLAM family member 7 polypeptide, a T-cell surface glycoprotein CD3 epsilon chain polypeptide, a T-cell surface glycoprotein CD3 gamma chain polypeptide, a T-cell surface glycoprotein CD3 zeta chain polypeptide, a carcinoembryonic antigen-related cell adhesion molecule 3 polypeptide, Ia macrophage mannose receptor 1 polypeptide, an intercellular adhesion molecule 1 polypeptide, an intercellular adhesion molecule 2 polypeptide, an intercellular adhesion molecule 3 polypeptide, an interleukin-1 receptor-associated kinase 1 polypeptide, an interleukin-1 receptor-associated kinase-like 2 polypeptide, an interleukin-1 receptor-associated kinase 4 polypeptide, a B-cell receptor CD22 polypeptide, a sialic acid-binding Ig-like lectin 14 polypeptide, a sialic acid-binding Ig-like lectin 15 polypeptide, a hepatitis A virus cellular receptor 1 polypeptide, a toll-like receptor 3 polypeptide, a toll-like receptor 4 polypeptide, a toll-like receptor 9 polypeptide, a tyrosine-protein kinase SYK polypeptide, a proto-oncogene tyrosine-protein kinase Src polypeptide, a tyrosine-protein kinase ZAP-70 polypeptide, a killer cell lectin-like receptor subfamily F member 2 polypeptide, a killer cell lectin-like receptor subfamily F member 1 polypeptide, a NKG2-D type II integral membrane protein polypeptide, a C-type lectin domain family 7 member A polypeptide, a tumor necrosis factor ligand superfamily member 9 polypeptide, a tumor necrosis factor ligand superfamily member 14 polypeptide, a tumor necrosis factor ligand superfamily member 13B polypeptide, or a paired immunoglobulin-like type 2 receptor beta (PILRB).

[0265] In some embodiments, an engineered protein (e.g., chimeric protein) provided herein includes an comprising the intracellular domain of one or more stimulatory polypeptides presented in Table 2.1. In some embodiments, an engineered protein (e.g., chimeric protein) provided herein includes an intracellular domain selected from the intracellular domains presented in Table 2.1.

TABLE 2.1
Exemplary IntraceHular Domains

| | | | | Amino | SEQ |
|---|---|---|---|---|---|
| | UNIPROT | | | acid | ID |
| Intracellular Polypeptide | ID | Start | End | length | NO: |
| Hematopoietic cell signal transducer (also known as | Q9UBK5 | 70 | 93 | 24 | 48 |
| DAP10) | | | | | |
| Protein GAPT (also known as GAPT) | Q8N292 | 32 | 157 | 126 | 49 |
| TYRO protein tyrosine kinase-binding protein (also | O43914 | 62 | 113 | 52 | 50 |
| known as DAP12) | | | | | |
| High affinity immunoglobulin epsilon receptor | P30273 | 45 | 86 | 42 | 51 |
| subunit gamma (also known as FcRgamma and | | | | | |
| FceRI gamma) | | | | | |
| High affinity immunoglobulin gamma Fc receptor I | P12314 | 314 | 374 | 61 | 52 |
| (also known as FcRI, Fc-gamma RI, and CD64A) | | | | | |
| Low affinity immunoglobulin gamma Fc region | P12318 | 241 | 317 | 77 | 53 |
| receptor II-a (also known as FcRII-a, Fc-gamma | | | | | |
| RIIa, and CD32A) | | | | | |
| Low affinity immunoglobulin gamma Fc region | P31995 | 247 | 323 | 77 | 54 |
| receptor II-c (also known as FcRII-c, Fc-gamma | | | | | |
| RIIc, and CD32C) | | | | | |
| Low affinity immunoglobulin gamma Fc region | P08637 | 230 | 254 | 25 | 55 |
| receptor III-A (also known as FcRIIIa, Fc-gamma | | | | | |
| RIIIa, and CD16A) | | | | | |
| Immunoglobulin alpha Fc receptor (also known as | P24071 | 247 | 287 | 41 | 56 |
| FCARI and CD89) | | | | | |
| Lymphocyte function-associated antigen 3 (also | P19256 | 239 | 250 | 12 | 57 |
| known as LFA-3 and CD58) | | | | | |
| Natural killer cell receptor 2B4 (also known as 2B4, | Q9BZW8 | 251 | 370 | 120 | 58 |
| SLAMF4, and CD244) | | | | | |
| Signaling lymphocytic activation molecule (also | Q13291 | 259 | 335 | 77 | 59 |
| known as SLAM, SLAMF1, and CD150) | | | | | |
| SLAM family member 5 (also known as SLAMF5 | Q9UIB8 | 247 | 345 | 99 | 60 |
| and CD84) | | | | | |
| SLAM family member 6 (also known as SLAMF6, | Q96DU3 | 248 | 331 | 84 | 61 |
| NTB-A, and CD352) | | | | | |
| SLAM family member 7 (also known as SLAMF7 | Q9NQ25 | 248 | 335 | 88 | 62 |
| and CD319) | | | | | |
| T-cell surface antigen CD2 (also known as LFA-2 | P06729 | 236 | 351 | 116 | 63 |
| and CD2) | | | | | |
| T-lymphocyte surface antigen Ly-9 (also known as | Q9HBG7 | 477 | 655 | 179 | 64 |
| SLAMF3, Ly-9 and CD229) | | | | | |
| T-cell surface glycoprotein CD3 epsilon chain (also | P07766 | 153 | 207 | 55 | 65 |
| known as CD3E) | | | | | |
| T-cell surface glycoprotein CD3 gamma chain (also | P09693 | 138 | 182 | 45 | 66 |
| known as CD3G) | | | | | |
| T-cell surface glycoprotein CD3 zeta chain (also | P20963 | 52 | 164 | 113 | 67 |
| known as CD3Z and CD247) | | | | | |
| Carcinoembryonic antigen-related cell adhesion | P40198 | 177 | 252 | 76 | 68 |
| molecule 3 (also known as CEACAM-3 and | | | | | |
| CD66D) | | | | | |
| Complement receptor type 1 (also known as CR1, | P17927 | 1997 | 2039 | 43 | 69 |
| C3B/C4b receptor, and CD35) | | | | | |
| Membrane cofactor protein (also known as MCP | P15529 | 367 | 392 | 26 | 70 |
| and CD46) | | | | | |
| Macrophage mannose receptor 1 (also known as | P22897 | 1411 | 1456 | 46 | 71 |
| MMR and CD206) | | | | | |
| Cytokine receptor common subunit beta (also | P32927 | 461 | 897 | 437 | 72 |
| known as CD131) | | | | | |
| Cytokine receptor common subunit gamma (also | P31785 | 284 | 369 | 86 | 73 |
| known as IL-2RG and CD132) | | | | | |
| Cytokine receptor-like factor 2 (also known as | Q9HC73 | 253 | 371 | 119 | 74 |
| TSLP-R) | | | | | |
| Erythropoietin receptor (also known as EPO-R and | P19235 | 274 | 508 | 235 | 75 |
| EPOR) | | | | | |
| Granulocyte colony-stimulating factor receptor (also | Q99062 | 651 | 836 | 186 | 76 |
| known as G-CSF-R, GCSFR, and CD114) | | | | | |
| Granulocyte-macrophage colony-stimulating factor | P15509 | 347 | 400 | 54 | 77 |
| receptor subunit alpha (also known as GM-CSF-R- | | | | | |
| alpha and CD116) | | | | | |
| Interferon alpha/beta receptor 1 (also known as IFN- | P17181 | 458 | 557 | 100 | 78 |
| R1 and IFNA/B-R1) | | | | | |
| Interferon alpha/beta receptor 2 (also known as IFN- | P48551 | 265 | 515 | 251 | 79 |
| R2 and IFNA/B-R2) | | | | | |
| Interferon lambda receptor 1 (also known as IL- | Q8IU57 | 250 | 520 | 271 | 80 |
| 28RA and IFN-lambda-R1) | | | | | |
| Interleukin-1 receptor accessory protein (also | Q9NPH3 | 389 | 570 | 182 | 81 |
| known as IL-1R3 and IL-1RAP) | | | | | |
| Interleukin-1 receptor type 1 (also known as IL- | P14778 | 357 | 569 | 213 | 82 |
| 1R1, IL-1RA, and CD121A) | | | | | |
| Interleukin-1 receptor-like 1 (also known as ST2 | Q01638 | 350 | 556 | 207 | 83 |
| and IL-1RL1) | | | | | |
| Interleukin-1 receptor-like 2 (also known as IL-36R | Q9HB29 | 357 | 575 | 219 | 84 |
| and IL-1RL2) | | | | | |
| Interleukin-11 receptor subunit alpha (also known | Q14626 | 392 | 422 | 31 | 85 |
| as IL-11RA) | | | | | |
| Interleukin-12 receptor subunit beta-1 (also known | P42701 | 571 | 662 | 92 | 86 |
| as IL-12RB1 and CD212) | | | | | |
| Interleukin-12 receptor subunit beta-2 (also known | Q99665 | 644 | 862 | 219 | 87 |
| as IL-12RB2) | | | | | |
| Interleukin-17 receptor A (also known as IL-17RA | Q96F46 | 342 | 866 | 525 | 88 |
| and CD217) | | | | | |
| Interleukin-17 receptor B (also known as IL-17RB) | Q9NRM6 | 314 | 502 | 189 | 89 |
| Interleukin-17 receptor C (also known as IL-17RC) | Q8NAC3 | 560 | 791 | 232 | 90 |
| Interleukin-17 receptor E (also known as IL-17RE) | Q8NFR9 | 476 | 667 | 192 | 91 |
| Interleukin-18 receptor 1 (also known as IL-18R1, | Q13478 | 351 | 541 | 191 | 92 |
| IL-1RRP, and CD218A) | | | | | |
| Interleukin-18 receptor accessory protein (also | O95256 | 378 | 599 | 222 | 93 |
| known as IL-18RB, IL1-R7, and CD218B) | | | | | |
| Interleukin-2 receptor subunit beta (also known as | P14784 | 266 | 551 | 286 | 94 |
| IL-2RB, IL-15RB, and CD122) | | | | | |
| Interleukin-21 receptor (also known as IL-21R and | Q9HBE5 | 254 | 538 | 285 | 95 |
| CD360) | | | | | |
| Interleukin-22 receptor subunit alpha-1 (also known | Q8N6P7 | 250 | 574 | 325 | 96 |
| as IL-22RA1) | | | | | |
| Interleukin-23 receptor (also known as IL-23R) | Q5VWK5 | 377 | 629 | 253 | 97 |
| Interleukin-27 receptor subunit alpha (also known | Q6UWB1 | 538 | 636 | 99 | 98 |
| as IL-27RA and WSX-1) | | | | | |
| Interleukin-3 receptor subunit alpha (also known as | P26951 | 326 | 378 | 53 | 99 |
| IL-3RA and CD123) | | | | | |
| Interleukin-6 receptor subunit beta (also known as | P40189 | 642 | 918 | 277 | 100 |
| IL-6RB, gp130, and CD130) | | | | | |
| Interleukin-7 receptor subunit alpha (also known as | P16871 | 265 | 459 | 195 | 101 |
| IL-7RA and CD127) | | | | | |
| Leukemia inhibitory factor receptor (also known as | P42702 | 859 | 1097 | 239 | 102 |
| LIF-R and CD118) | | | | | |
| Macrophage colony-stimulating factor 1 receptor | P07333 | 539 | 972 | 434 | 103 |
| (also known as M-CSF-R, CSF-1R, CSF1R, and | | | | | |
| CD115) | | | | | |
| Oncostatin-M-specific receptor subunit beta (also | Q99650 | 762 | 979 | 218 | 104 |
| known as OSM-RB and IL-31RB) | | | | | |
| Epidermal growth factor receptor (also known as | P00533 | 669 | 1210 | 542 | 105 |
| EGFR and Her1) | | | | | |
| Growth hormone receptor (also known as GHR and | P10912 | 289 | 638 | 350 | 106 |
| GH receptor) | | | | | |
| Insulin receptor (also known as IR and CD220) | P06213 | 980 | 1382 | 403 | 107 |
| Leptin receptor (also known as LEP-R, OB-R, and | P48357 | 863 | 1165 | 303 | 108 |
| CD295) | | | | | |
| Prolactin receptor (also known as PRL-R) | P16471 | 259 | 622 | 364 | 109 |
| Thrombopoietin receptor (also known as TPO-R, c- | P40238 | 514 | 635 | 122 | 110 |
| Mpl, and CD110) | | | | | |
| Epidermal growth factor receptor (also known as | P00533 | 669 | 1210 | 542 | 111 |
| EGFR and ErbB1) | | | | | |
| Receptor tyrosine-protein kinase erbB-2 (also | P04626 | 676 | 1255 | 580 | 112 |
| known as HER2, Neu, and ErbB2) | | | | | |
| Hepatocyte growth factor receptor (also known as | P08581 | 956 | 1390 | 435 | 113 |
| HGFR and c-Met) | | | | | |
| Fibroblast growth factor receptor 1 (also known as | P11362 | 398 | 822 | 425 | 114 |
| FGFR1, and CD331) | | | | | |
| Fibroblast growth factor receptor 2 (also known as | P21802 | 399 | 821 | 423 | 115 |
| FGFR2 and CD332) | | | | | |
| Fibroblast growth factor receptor 3 (also known as | P22607 | 397 | 806 | 410 | 116 |
| FGFR3 and CD333) | | | | | |
| Fibroblast growth factor receptor 4 (also known as | P22455 | 391 | 802 | 412 | 117 |
| FGFR4 and CD334) | | | | | |
| Vascular endothelial growth factor receptor 2 (also | P35968 | 786 | 1356 | 571 | 118 |
| known as VEGFR-2 and CD309) | | | | | |
| Vascular endothelial growth factor receptor 3 (also | P35916 | 797 | 1363 | 567 | 119 |
| known as VEGFR-3) | | | | | |
| Ephrin type-A receptor 1 (also known as EPHAl | P21709 | 569 | 976 | 408 | 120 |
| and EPH) | | | | | |
| Ephrin type-B receptor 1 (also known as EPHB1, | P54762 | 564 | 984 | 421 | 121 |
| EK6, and ELK) | | | | | |
| Platelet-derived growth factor receptor alpha (also | P16234 | 550 | 1089 | 540 | 122 |
| known as PDGFRA and CD140a) | | | | | |
| Platelet-derived growth factor receptor beta (also | P09619 | 554 | 1106 | 553 | 123 |
| known as PDGFRB and CD140b) | | | | | |
| B-cell antigen receptor complex-associated protein | P11912 | 166 | 226 | 61 | 124 |
| alpha chain (also known as Ig-alpha and CD79A) | | | | | |
| B-cell antigen receptor complex-associated protein | P40259 | 181 | 229 | 49 | 125 |
| beta chain (also known as Ig-beta and CD79B) | | | | | |
| CD160 antigen (also known as CD160 and CD160) | O95971 | 183 | 234 | 52 | 126 |
| CD226 antigen (also known as DNAM-1 and | Q15762 | 276 | 336 | 61 | 127 |
| CD226) | | | | | |
| CD83 antigen (also known as CD83) | Q01151 | 167 | 205 | 39 | 128 |
| Inducible T-cell costimulator (also known as ICOS | Q9Y6W8 | 162 | 199 | 38 | 129 |
| and CD278) | | | | | |
| Intercellular adhesion molecule 1 (also known as | P05362 | 504 | 532 | 29 | 130 |
| ICAM-1 and CD54) | | | | | |
| Intercellular adhesion molecule 2 (also known as | P13598 | 249 | 275 | 27 | 131 |
| ICAM-2 and CD102) | | | | | |
| Intercellular adhesion molecule 3 (also known as | P32942 | 511 | 547 | 37 | 132 |
| ICAM-3 and CD50) | | | | | |
| Killer cell immunoglobulin-like receptor 2DL4 (also | Q99706 | 264 | 377 | 114 | 133 |
| known as KIR2DL4 and CD158D) | | | | | |
| Killer cell immunoglobulin-like receptor 2DS1 (also | Q14954 | 265 | 304 | 40 | 134 |
| known as KIR2DS1 and CD158H) | | | | | |
| Killer cell immunoglobulin-like receptor 2DS2 (also | P43631 | 266 | 304 | 39 | 135 |
| known as KIR2DS2 and CD158J) | | | | | |
| Killer cell immunoglobulin-like receptor 2DS3 (also | Q14952 | 265 | 304 | 40 | 136 |
| known as KIR2DS3) | | | | | |
| Killer cell immunoglobulin-like receptor 2DS4 (also | P43632 | 266 | 304 | 39 | 137 |
| known as KIR2DS4 and CD158I) | | | | | |
| Killer cell immunoglobulin-like receptor 2DS50 | Q14953 | 265 | 304 | 40 | 138 |
| (also known as KIR2DS5 and CD158G) | | | | | |
| Killer cell immunoglobulin-like receptor 3DS1 (also | Q14943 | 361 | 382 | 22 | 139 |
| known as KIR3DS1) | | | | | |
| Natural cytotoxicity triggering receptor 1 (also | O76036 | 280 | 304 | 25 | 140 |
| known as NKp46, Ly94, and CD335) | | | | | |
| Natural cytotoxicity triggering receptor 2 (also | O95944 | 214 | 276 | 63 | 141 |
| known as NKp44 and CD336) | | | | | |
| Natural cytotoxicity triggering receptor 3 (also | O14931 | 157 | 201 | 45 | 142 |
| known as NKp30 and CD337) | | | | | |
| T-cell antigen CD7 (also known as CD7) | P09564 | 202 | 240 | 39 | 143 |
| T-cell surface glycoprotein CD4 (also known as | P01730 | 419 | 458 | 40 | 144 |
| CD4) | | | | | |
| T-cell-specific surface glycoprotein CD28 (also | P10747 | 180 | 220 | 41 | 145 |
| known as CD28) | | | | | |
| Transmembrane and immunoglobulin domain- | Q96BF3 | 172 | 282 | 111 | 146 |
| containing protein 2 (also known as TMIGD2, | | | | | |
| CD28H, and IGPR-1) | | | | | |
| Intercellular adhesion molecule 5 (also known as | Q9UMF0 | 857 | 924 | 68 | 147 |
| ICAM-5 and telencephalin) | | | | | |
| Integrin alpha-L (also known as LFA-1A and | P20701 | 1112 | 1170 | 59 | 148 |
| CD11A) | | | | | |
| Integrin beta-2 (also known as LFA-1B and CD18) | P05107 | 724 | 769 | 46 | 149 |
| Cytotoxic and regulatory T-cell molecule (also | O95727 | 309 | 393 | 85 | 150 |
| known as CRTAM and CD355) | | | | | |
| B-cell receptor CD22 (also known as Siglec-2 and | P20273 | 707 | 847 | 141 | 151 |
| CD22) | | | | | |
| Sialic acid-binding Ig-like lectin 14 (also known as | Q08ET2 | 382 | 396 | 15 | 152 |
| Siglec-14) | | | | | |
| Sialic acid-binding Ig-like lectin 15 (also known as | Q6ZMC9 | 285 | 328 | 44 | 153 |
| Siglec-15) | | | | | |
| Sialic acid-binding Ig-like lectin 16 (also known as | A6NMB1 | 456 | 481 | 26 | 154 |
| Siglec-16) | | | | | |
| Hepatitis A virus cellular receptor 1 (also known as | Q96D42 | 317 | 364 | 48 | 155 |
| TIM-1, KIM-1, and CD365) | | | | | |
| Toll-like receptor 1 (also known as TLR1 and | Q15399 | 602 | 786 | 185 | 156 |
| CD281) | | | | | |
| Toll-like receptor 10 (also known as TLR10 and | Q9BXR5 | 598 | 811 | 214 | 157 |
| CD290) | | | | | |
| Toll-like receptor 2 (also known as TLR2 and | O60603 | 610 | 784 | 175 | 158 |
| CD282) | | | | | |
| Toll-like receptor 3 (also known as TLR3 and | O15455 | 726 | 904 | 179 | 159 |
| CD283) | | | | | |
| Toll-like receptor 4 (also known as TLR4 and | O00206 | 653 | 839 | 187 | 160 |
| CD284) | | | | | |
| Toll-like receptor 5 (also known as TLR5 and | O60602 | 661 | 858 | 198 | 161 |
| CD285) | | | | | |
| Toll-like receptor 6 (also known as TLR6 and | Q9Y2C9 | 608 | 796 | 189 | 162 |
| CD286) | | | | | |
| Toll-like receptor 7 (also known as TLR7 and | Q9NYK1 | 861 | 1049 | 189 | 163 |
| CD287) | | | | | |
| Toll-like receptor 8 (also known as TLR8 and | Q9NR97 | 849 | 1041 | 193 | 164 |
| CD288) | | | | | |
| Toll-like receptor 9 (also known as TLR9 and | Q9NR96 | 840 | 1032 | 193 | 165 |
| CD289) | | | | | |
| CD27 antigen (also known as CD27) | P26842 | 213 | 260 | 48 | 166 |
| Tumor necrosis factor receptor superfamily member | Q9Y6Q6 | 234 | 616 | 383 | 167 |
| 11A (also known as RANK and CD265) | | | | | |
| Tumor necrosis factor receptor superfamily member | Q9NP84 | 102 | 129 | 28 | 168 |
| 12A (also known as TweakR, FN14, and CD266) | | | | | |
| Tumor necrosis factor receptor superfamily member | O14836 | 187 | 293 | 107 | 169 |
| 13B (also known as TACI and CD267) | | | | | |
| Tumor necrosis factor receptor superfamily member | Q96RJ3 | 100 | 184 | 85 | 170 |
| 13C (also known as BAFF-R and CD268) | | | | | |
| Tumor necrosis factor receptor superfamily member | Q92956 | 224 | 283 | 60 | 171 |
| 14 (also known as HVEM and CD270) | | | | | |
| Tumor necrosis factor receptor superfamily member | P08138 | 273 | 427 | 155 | 172 |
| 16 (also known as NGF-R, p75NTR, and CD271) | | | | | |
| Tumor necrosis factor receptor superfamily member | Q02223 | 78 | 184 | 107 | 173 |
| 17 (also known as BCMA and CD269) | | | | | |
| Tumor necrosis factor receptor superfamily member | Q9Y5U5 | 184 | 241 | 58 | 174 |
| 18 (also known as GITR and CD357) | | | | | |
| Tumor necrosis factor receptor superfamily member | Q9NS68 | 192 | 423 | 232 | 175 |
| 19 (also known as TROY and TRADE) | | | | | |
| Tumor necrosis factor receptor superfamily member | Q969Z4 | 184 | 430 | 247 | 176 |
| 19L (also known as RELT) | | | | | |
| Tumor necrosis factor receptor superfamily member | P19438 | 233 | 455 | 223 | 177 |
| lA (also known as TNF-RI and CD120A) | | | | | |
| Tumor necrosis factor receptor superfamily member | P20333 | 288 | 461 | 174 | 178 |
| 1B (also known as TNF-RII and CD120B) | | | | | |
| Tumor necrosis factor receptor superfamily member | Q93038 | 221 | 417 | 197 | 179 |
| 25 (also known as DR3 and TRAMP) | | | | | |
| Tumor necrosis factor receptor superfamily member | Q9HAV5 | 160 | 297 | 138 | 180 |
| 27 (also known as XEDAR and EDA-A2 receptor) | | | | | |
| Tumor necrosis factor receptor superfamily member | P36941 | 249 | 435 | 187 | 181 |
| 3 (also known as LTB-R and TNF-RIII) | | | | | |
| Tumor necrosis factor receptor superfamily member | P43489 | 236 | 277 | 42 | 182 |
| 4 (also known as OX-40 and CD134) | | | | | |
| Tumor necrosis factor receptor superfamily member | P25942 | 216 | 277 | 62 | 183 |
| 5 (also known as CD40) | | | | | |
| Tumor necrosis factor receptor superfamily member | P28908 | 407 | 595 | 189 | 184 |
| 8 (also known as CD30) | | | | | |
| Tumor necrosis factor receptor superfamily member | Q07011 | 214 | 255 | 42 | 185 |
| 9 (also known as 4-1BB and CD137) | | | | | |
| Tumor necrosis factor receptor superfamily member | Q9UNE0 | 209 | 448 | 240 | 186 |
| EDAR (also known as EDAR) | | | | | |
| Linker for activation of T-cells family member 1 | O43561 | 28 | 262 | 235 | 187 |
| (also known as LAT) | | | | | |
| Linker for activation of T-cells family member 2 | Q9GZY6 | 27 | 243 | 217 | 188 |
| (also known as LAT2, NTAL, and LAB) | | | | | |
| Lymphocyte transmembrane adapter 1 (also known | Q8IWV1 | 59 | 398 | 340 | 189 |
| as LAX) | | | | | |
| Phosphoprotein associated with glycosphingolipid- | Q9NWQ8 | 38 | 432 | 395 | 190 |
| enriched microdomains 1 (also known as PAG and | | | | | |
| CBP) | | | | | |
| Linker for activation of T-cells family member 1 | O43561 | 28 | 262 | 235 | 191 |
| (also known as LAT) | | | | | |
| Low affinity immunoglobulin epsilon Fc receptor | P06734 | 1 | 21 | 21 | 192 |
| (also known as FCERII and CD23) | | | | | |
| CD209 antigen (also known as DC-SIGN, CLEC- | Q9NNX6 | 1 | 37 | 37 | 193 |
| 4L and CD209) | | | | | |
| C-type lectin domain family 1 member B (also | Q9P126 | 1 | 33 | 33 | 194 |
| known as CLEC-2) | | | | | |
| C-type lectin domain family 7 member A (also | Q9BXN2 | 1 | 44 | 44 | 195 |
| known as Dectin-1 and CLEC-7A) | | | | | |
| C-type lectin domain family 9 member A (also | Q6UXN8 | 1 | 35 | 35 | 196 |
| known as DNGR-1 and CD370) | | | | | |
| Killer cell lectin-like receptor subfamily F member | Q9NZS2 | 1 | 38 | 38 | 197 |
| 1 (also known as NKp80, KLRF1, and CLEC5C) | | | | | |
| Killer cell lectin-like receptor subfamily F member | D3W0D1 | 1 | 30 | 30 | 198 |
| 2 (also known as NKp65 and KLRF2) | | | | | |
| NKG2-C type II integral membrane protein (also | P26717 | 1 | 70 | 70 | 199 |
| known as NKG2C, KLRC2, and CD159C) | | | | | |
| NKG2-D type II integral membrane protein (also | P26718 | 1 | 51 | 51 | 200 |
| known as NKG2D, and CD314) | | | | | |
| NKG2-E type II integral membrane protein (also | Q07444 | 1 | 70 | 70 | 201 |
| known as NKG2E and KLRC3) | | | | | |
| C-type lectin domain family 4 member E (also | Q9ULY5 | 1 | 19 | 19 | 202 |
| known as CLEC-4E and MINCLE) | | | | | |
| C-type lectin domain family 6 member A (also | Q6EIG7 | 1 | 20 | 20 | 203 |
| known as CLEC-6A and Dectin-2) | | | | | |
| C-type lectin domain family 10 member A (also | Q8IUN9 | 1 | 39 | 39 | 204 |
| known as CLEC-10A, MGL, and CD301) | | | | | |
| C-type lectin domain family 4 member D (also | Q8WXI8 | 1 | 17 | 17 | 205 |
| known as CLEC-4D, CLEC-6, Dectin-3, and | | | | | |
| CD368) | | | | | |
| C-type lectin domain family 4 member C (also | Q8WTT0 | 1 | 21 | 21 | 206 |
| known as CLEC-4C, BDCA-2, and CD303) | | | | | |
| C-type lectin domain family 17, member A (also | Q6ZS10 | 1 | 172 | 172 | 207 |
| known as CLEC-17A, and prolectin) | | | | | |
| CD70 antigen (also known as CD70) | P32970 | 1 | 17 | 17 | 208 |
| Tumor necrosis factor ligand superfamily member | O43557 | 1 | 37 | 37 | 209 |
| 14 (also known as LIGHT and CD258) | | | | | |
| Tumor necrosis factor ligand superfamily member 8 | P32971 | 1 | 37 | 37 | 210 |
| (also known as CD30L and CD153) | | | | | |
| Tumor necrosis factor (also known as tumor | P01375 | 1 | 35 | 35 | 211 |
| necrosis factor, TNFa and TNFSF1A) | | | | | |
| Tumor necrosis factor ligand superfamily member 4 | P23510 | 1 | 23 | 23 | 212 |
| (also known as OX40L, CD252, CD134L, and | | | | | |
| CD252) | | | | | |
| CD40 ligand (also known as CD40L, CD154, and | P29965 | 1 | 22 | 22 | 213 |
| CD154) | | | | | |
| Tumor necrosis factor ligand superfamily member 6 | P48023 | 1 | 80 | 80 | 214 |
| (also known as FasL, CD178, CD95L and CD178) | | | | | |
| Tumor necrosis factor ligand superfamily member 9 | P41273 | 1 | 28 | 28 | 215 |
| (also known as 4-1BBL and CD137L) | | | | | |
| Tumor necrosis factor ligand superfamily member | P50591 | 1 | 17 | 17 | 216 |
| 10 (also known as TRAIL, TNF-related apoptosis- | | | | | |
| inducing ligand, CD253, APO-2L, and CD253) | | | | | |
| Tumor necrosis factor ligand superfamily member | O14788 | 1 | 47 | 47 | 217 |
| 11 (also known as TRANCE, RANKL, CD254, | | | | | |
| OPGL, and CD254) | | | | | |
| Tumor necrosis factor ligand superfamily member | O43508 | 1 | 21 | 21 | 218 |
| 12 (also known as TWEAK, APO-3L, and DR3L) | | | | | |
| Tumor necrosis factor ligand superfamily member | O75888 | 1 | 28 | 28 | 219 |
| 13 (also known as APRIL, CD256, TALL-2, | | | | | |
| TRDL1, and CD256) | | | | | |
| Tumor necrosis factor ligand superfamily member | Q9Y275 | 1 | 46 | 46 | 220 |
| 13B (also known as BAFF, B-Cell Activating | | | | | |
| Factor, CD257, TALL-1, and CD257) | | | | | |
| Tumor necrosis factor ligand superfamily member | Q9UNG2 | 23 | 50 | 28 | 221 |
| 18 (also known as TNFSF18, GITRL, TL-6) | | | | | |
| Paired immunoglobulin-like type 2 receptor beta | Q9UKJ0 | 213 | 227 | 15 | 535 |
| (also known as PILRB) | | | | | |

[0266] In some embodiments, an engineered protein (e.g., chimeric protein) described herein comprises an intracellular domain comprising an amino acid sequence having at least 90%, at least 91%, at least 92%, at least 93%, at least 94%, at least 95%, at least 96%, at least 97%, at least 98%, at least 99% or 100% identity with the amino acid sequence of any one of SEQ ID NOs: 48-221 and 535.

[0267] In some embodiments, an engineered protein (e.g., chimeric protein) described herein includes an intracellular domain of a DAP10 polypeptide, or a portion thereof. In some embodiments, an engineered protein (e.g., chimeric protein) described herein includes an intracellular domain derived from a human DAP10 polypeptide or a portion thereof which comprises an amino acid sequence having at least 90%, at least 91%, at least 92%, at least 93%, at least 94%, at least 95%, at least 96%, at least 97%, at least 98%, at least 99%, or 100% identity with the amino acid sequence of SEQ ID NO: 48.

[0268] In some embodiments, an engineered protein (e.g., chimeric protein) described herein includes an intracellular domain of a DAP12 polypeptide or a portion thereof. In some embodiments, an engineered protein (e.g., chimeric protein) provided herein includes an intracellular domain derived from a human DAP12 polypeptide or a portion thereof which comprises an amino acid sequence having at least 90%, at least 91%, at least 92%, at least 93%, at least 94%, at least 95%, at least 96%, at least 97%, at least 98%, at least 99%, or 100% identity with the amino acid sequence of SEQ ID NO: 50.

[0269] In some embodiments, an engineered protein (e.g., chimeric protein) described herein includes both an intracellular domain of a DAP10 polypeptide or a portion thereof, and an intracellular domain of a TGF-BR2 polypeptide or a portion thereof. In some embodiments, an engineered protein (e.g., chimeric protein) provided herein includes an intracellular domain derived from a human DAP10 polypeptide or a portion thereof, and an intracellular domain derived form a human TGF-BR2 polypeptide or a portion thereof, and the intracellular domain comprises an amino acid sequence having at least 90%, at least 91%, at least 92%, at least 93%, at least 94%, at least 95%, at least 96%, at least 97%, at least 98%, at least 99%, or 100% identity with the amino acid sequence of SEQ ID NO: 222.

[0270] In some embodiments, an engineered protein (e.g., chimeric protein) provided herein includes an intracellular domain of a CD3ζ (CD3zeta) polypeptide or a portion thereof. In some embodiments, an engineered protein (e.g., chimeric protein) provided herein includes an intracellular domain derived from human CD3zeta or a portion thereof, which comprises an amino acid sequence having at least 90%, at least 91%, at least 92%, at least 93%, at least 94%, at least 95%, at least 96%, at least 97%, at least 98%, at least 99% or 100% identity with the amino acid sequence of SEQ ID NO: 67. In some embodiments, the CD3zeta from which the intracellular domain is derived comprises a mutation in an ITAM domain.

[0271] In some embodiments, an engineered protein described herein includes an intracellular domain of PILRB, or a portion thereof. In some embodiments, an engineered protein described herein includes an intracellular domain derived from PILRB (e.g., SEQ ID NO: 533) or a portion thereof which comprises an amino acid sequence having at least 90%, at least 91%, at least 92%, at least 93%, at least 94%, at least 95%, at least 96%, at least 97%, at least 98%, at least 99%, or 100% identity with the amino acid sequence of SEQ ID NO: 535.

[0272] The intracellular domain (ICD) of an engineered protein (e.g., chimeric protein) derived herein may provide a signal that activates the cell expressing the protein. In immune cells, including NK cells, diverse upstream signals converge on four transcription factor pathways: nuclear factor kappa B (NF-κB), activator protein 1 (AP-1), nuclear factor of activated T-cells (NFAT), and signal transducer and activator of transcription proteins (STATs), crucial to cellular functions including survival, proliferation, cytokine production, and cytotoxic activity. Therefore, the activity of an intracellular domain included in an engineered protein (e.g., chimeric protein) described herein may be assessed by testing the activation of one of these four pathways using methods known in the art. For example, engineered proteins (e.g., chimeric proteins) including an intracellular domain from CARD11, DAP10, LAT, LAT2, SLP76, LAX, MyD88, PAG, GAPT, SAP, EAT-2, or DAP12 may be tested for NF-κB, AP-1, and/or NFAT activity; engineered proteins (e.g., chimeric proteins) including an intracellular domain from TLR1, TLR10, TLR2, TLR3, TLR4, TLR5, TLR6, TLR7, TLR8, and TLR9 may be tested for NF-κB and/or AP-1 activity; engineered proteins (e.g., chimeric proteins) including an intracellular domain from CD131, EGFR, EPO-R, G-CSF-R, GM-CSF-R-alpha, IL-2RB, TSLP-R may be tested for NF-κB, AP-1, STAT5, and/or STAT3 activity; engineered proteins (e.g., chimeric proteins) including an intracellular domain from IL-17RA, IL-17RB, IL-17RC, IL-17RE, IL-18R1, IL-18RB, IL-1R1, IL-1R3, IL-36R, M-CSF-R, ST2, IL-22RA1, IL-21R, GHR, IFN-R1, IFN-R2, IL-27RA, IL-11RA, IL-6RB, LIF-R, OSM-RB, LEP-R, TPO-R, IL-2RG, PRL-κR, IL-3RA, IL-23R, IL-12RB1, IL-12RB2, IL-28RA, and IL-7RA may be tested for NF-B, AP-1, STAT1, STAT 2, STAT3 and/or STAT5 signaling using methods known in the art. For example, NK-κB activity may be assessed by detecting and/or analyzing phosphorylated RelA/p65 levels, AP-1 activity may be assessed by detecting and/or analyzing phosphorylated c-Jun levels, NFAT activity may be assessed by detecting and/or analyzing dephosphorylated NFAT1 levels, STAT activity may be assessed by detecting and/or analyzing phosphorylated STAT5A levels, and phosphatidylinositol 3-kinase (PI3K) activity may be assessed by detecting phosphorylated Akt levels, each in a cell or population of cells expressing an engineered protein (e.g., chimeric protein) provided herein (in the presence and/or absence of exposure of the cells to a ligand of the engineered protein (e.g., chimeric protein) (e.g., a negative signal)).

[0273] C. Transmembrane Domains

[0274] Suitable transmembrane domains of an engineered protein (e.g., chimeric protein) disclosed herein have the ability to: (a) be expressed at the surface of a cell, which is in some embodiments an immune cell (e.g., a NK cell), and/or (b) interact with the extracellular domain and intracellular domain for directing cellular response of the cell. The transmembrane domain can be a transmembrane domain of any membrane-bound or transmembrane protein.

[0275] In some embodiments, the transmembrane domain of an engineered protein (e.g., chimeric protein) provided herein is a transmembrane domain, or a portion thereof, of an inhibitory polypeptide. In some embodiments, the transmembrane domain and the extracellular domain are derived from the same inhibitory polypeptide. In some embodiments, the transmembrane domain and the extracellular domain are derived from different polypeptides (e.g., different inhibitory polypeptides). In some embodiments, the transmembrane domain of an engineered protein (e.g., chimeric protein) provided herein comprises or consists of a transmembrane domain, or a portion thereof, of an inhibitory polypeptide presented in Table 1. In some embodiments, the transmembrane domain of an engineered protein (e.g., chimeric protein) provided herein comprises or consists of the transmembrane domain of an inhibitory polypeptide presented in Table 1.1. In some embodiments, the transmembrane domain of the engineered protein (e.g., chimeric protein) provided herein comprises or consists of a transmembrane domain of an inhibitory polypeptide listed in Table 1.2.

TABLE 1.2
Exemplary Transmembrane Domains

| | | | | Amino | SEQ |
|---|---|---|---|---|---|
| | | | | acid | ID |
| Inhibitory polypeptide | UNIPROT ID | Start | End | length | NO: |
| BTLA | Q7Z6A9 | 158 | 178 | 21 | 223 |
| CD160 | O95971 | 163 | 182 | 20 | 224 |
| CD200R | Q8TD46 | 244 | 264 | 21 | 225 |
| CD33 | P20138 | 260 | 282 | 23 | 226 |
| CEACAM-1 | P13688 | 429 | 452 | 24 | 227 |
| (also known as CD66a) | | | | | |
| CTLA-4 | P16410 | 162 | 182 | 21 | 228 |
| Fas | P25445 | 174 | 190 | 17 | 229 |
| FCRL6 | Q6DN72 | 308 | 328 | 21 | 230 |
| IL-10RA | Q13651 | 236 | 256 | 21 | 231 |
| IL-10RB | Q08334 | 221 | 242 | 22 | 232 |
| IL-1R8 | A0A291NLA3 | 119 | 140 | 22 | 233 |
| IL-6RA | P08887 | 366 | 386 | 21 | 234 |
| IL-6RB (also known | P40189 | 620 | 641 | 22 | 235 |
| as gp130 and CD130) | | | | | |
| KIR2DL1 | P43626 | 246 | 264 | 19 | 236 |
| KIR2DL2 | P43627 | 246 | 264 | 19 | 237 |
| KIR2DL3 | P43628 | 246 | 265 | 20 | 238 |
| KIR2DL5A | Q8N109 | 239 | 259 | 21 | 239 |
| KIR2DL5B | Q8NHK3 | 239 | 259 | 21 | 240 |
| KIR3DL1 | P43629 | 341 | 360 | 20 | 241 |
| KIR3DL2 | P43630 | 341 | 360 | 20 | 242 |
| KIR3DL3 | Q8N743 | 323 | 343 | 21 | 243 |
| Lag3 | P18627 | 451 | 471 | 21 | 244 |
| LILRB1 | Q8NHL6 | 462 | 482 | 21 | 245 |
| LILRB2 | Q8N423 | 462 | 482 | 21 | 246 |
| LILRB3 | O75022 | 444 | 464 | 21 | 247 |
| LILRB4 | Q8NHJ6 | 260 | 280 | 21 | 248 |
| LILRB5 | O75023 | 459 | 479 | 21 | 249 |
| NKp30c | O14931-2 | 136 | 156 | 21 | 250 |
| PD-1 | Q15116 | 171 | 191 | 21 | 251 |
| Siglec-10 | Q96LC7 | 551 | 571 | 21 | 252 |
| Siglec-7 | Q9Y286 | 354 | 376 | 23 | 253 |
| Siglec-9 | Q9Y336 | 349 | 369 | 21 | 254 |
| TACTILE | P40200 | 520 | 540 | 21 | 255 |
| (also known as CD96) | | | | | |
| TGF-BR1 | P36897 | 127 | 147 | 21 | 256 |
| TGF-BR2 | P37173 | 167 | 187 | 21 | 257 |
| TIGIT | Q495A1 | 142 | 162 | 21 | 258 |
| TIM-3 | Q8TDQ0 | 203 | 223 | 21 | 259 |
| CD94 | Q13241 | 11 | 31 | 21 | 260 |
| KLRB1 (NKR-P1A) | Q12918 | 46 | 66 | 21 | 261 |
| KLRG1 | Q96E93 | 39 | 59 | 21 | 262 |
| NKG2A | P26715 | 71 | 93 | 23 | 263 |

[0276] In some embodiments, an engineered protein (e.g., chimeric protein) provided herein includes a transmembrane domain of a cluster of differentiation 4 (CD4) protein (e.g., a human CD4 protein) or a transmembrane domain of a cluster of differentiation 8 (CD8) protein (e.g., a human CD8 protein).

[0277] In some embodiments, an engineered protein (e.g., chimeric protein) provided herein includes a transmembrane domain comprises or consists of an amino acid sequence having at least 90%, at least 91%, at least 92%, at least 93%, at least 94%, at least 95%, at least 96%, at least 97%, at least 98%, at least 99% or 100% identity with the amino acid sequence of any one of SEQ ID NOs: 223-263.

[0278] In some embodiments, an engineered protein (e.g., chimeric protein) provided herein includes a transmembrane domain of a stimulatory polypeptide, or portion thereof. In some embodiments, an engineered protein (e.g., chimeric protein) provided herein includes a transmembrane domain and an intracellular domain, and both domains are derived from the same stimulatory polypeptide. In some embodiments, an engineered protein (e.g., chimeric protein) provided herein includes a transmembrane domain and an intracellular domain, and both domains are derived from different polypeptides (e.g., different stimulatory polypeptides or one stimulatory polypeptide and one inhibitory polypeptide). In some embodiments, an engineered protein (e.g., chimeric protein) provided herein includes a transmembrane domain of a stimulatory polypeptide presented in Table 2. In some embodiments, an engineered protein (e.g., chimeric protein) provided herein includes a transmembrane domain of a stimulatory polypeptide is selected from the stimulatory polypeptides presented in Table 2.1.

[0279] In some embodiments, the transmembrane domain of an engineered protein (e.g., chimeric protein) provided herein is a transmembrane domain of a stimulatory polypeptide listed in Table 2.2.

TABLE 2.2
Examples of Transmembrane Domains

| | | | | Amino | |
|---|---|---|---|---|---|
| | UNIPROT | | | acid | SEQ ID |
| Stimulatory Polypeptide | ID | Start | End | length | NO: |
| Hematopoietic cell signal transducer (also | Q9UBK5 | 49 | 69 | 21 | 264 |
| known as DAP10) | | | | | |
| Protein GAPT (also known as GAPT) | Q8N292 | 11 | 31 | 21 | 265 |
| TYRO protein tyrosine kinase-binding | O43914 | 41 | 61 | 21 | 266 |
| protein (also known as DAP12) | | | | | |
| High affinity immunoglobulin epsilon | P30273 | 24 | 44 | 21 | 267 |
| receptor subunit gamma (also known as | | | | | |
| FcRgamma and FceRI gamma) | | | | | |
| High affinity immunoglobulin gamma Fc | P12314 | 293 | 313 | 21 | 268 |
| receptor I (also known as FcRI, Fc-gamma | | | | | |
| RI, and CD64A) | | | | | |
| Low affinity immunoglobulin gamma Fc | P12318 | 218 | 240 | 23 | 269 |
| region receptor II-a (also known as FcRII-a, | | | | | |
| Fc-gamma RIIa, and CD32A) | | | | | |
| Low affinity immunoglobulin gamma Fc | P31995 | 224 | 246 | 23 | 270 |
| region receptor II-c (also known as FcRII-c, | | | | | |
| Fc-gamma RIIc, and CD32C) | | | | | |
| Low affinity immunoglobulin gamma Fc | P08637 | 209 | 229 | 21 | 271 |
| region receptor III-A (also known as | | | | | |
| FcRIIIa, Fc-gamma RIIIa, and CD16A) | | | | | |
| Immunoglobulin alpha Fc receptor (also | P24071 | 228 | 246 | 19 | 272 |
| known as FCARI, and CD89) | | | | | |
| Lymphocyte function-associated antigen 3 | P19256 | 216 | 238 | 23 | 273 |
| (also known as LFA-3, and CD58) | | | | | |
| Natural killer cell receptor 2B4 (also known | Q9BZW8 | 230 | 250 | 21 | 274 |
| as 2B4, SLAMF4, and CD244) | | | | | |
| Signaling lymphocytic activation molecule | Q13291 | 238 | 258 | 21 | 275 |
| (also known as SLAM, SLAMF1, and | | | | | |
| CD150) | | | | | |
| SLAM family member 5 (also known as | Q9UIB8 | 226 | 246 | 21 | 276 |
| SLAMF5 and CD84) | | | | | |
| SLAM family member 6 (also known as | Q96DU3 | 227 | 247 | 21 | 277 |
| SLAMF6, NTB-A, and CD352) | | | | | |
| SLAM family member 7 (also known as | Q9NQ25 | 227 | 247 | 21 | 278 |
| SLAMF7 and CD319) | | | | | |
| T-cell surface antigen CD2 (also known as | P06729 | 210 | 235 | 26 | 279 |
| LFA-2 and CD2) | | | | | |
| T-lymphocyte surface antigen Ly-9 (also | Q9HBG7 | 455 | 476 | 22 | 280 |
| known as SLAMF3, Ly-9, and CD229) | | | | | |
| T-cell surface glycoprotein CD3 epsilon | P07766 | 127 | 152 | 26 | 281 |
| chain (also known as CD3E) | | | | | |
| T-cell surface glycoprotein CD3 gamma | P09693 | 117 | 137 | 21 | 282 |
| chain (also known as CD3G) | | | | | |
| T-cell surface glycoprotein CD3 zeta chain | P20963 | 31 | 51 | 21 | 283 |
| (also known as CD3Z and CD247) | | | | | |
| Carcinoembryonic antigen-related cell | P40198 | 156 | 176 | 21 | 284 |
| adhesion molecule 3 (also known as | | | | | |
| CEACAM-3 and CD66D) | | | | | |
| Complement receptor type 1 (also known as | P17927 | 1972 | 1996 | 25 | 285 |
| CR1, C3B/C4b receptor and CD35) | | | | | |
| Membrane cofactor protein (also known as | P15529 | 344 | 366 | 23 | 286 |
| MCP and CD46) | | | | | |
| Macrophage mannose receptor 1 (also | P22897 | 1390 | 1410 | 21 | 287 |
| known as MMR and CD206) | | | | | |
| Cytokine receptor common subunit beta | P32927 | 444 | 460 | 17 | 288 |
| (also known as CD131) | | | | | |
| Cytokine receptor common subunit gamma | P31785 | 263 | 283 | 21 | 289 |
| (also known as IL-2RG and CD132) | | | | | |
| Cytokine receptor-like factor 2 (also known | Q9HC73 | 232 | 252 | 21 | 290 |
| as TSLP-R) | | | | | |
| Erythropoietin receptor (also known as EPO- | P19235 | 251 | 273 | 23 | 291 |
| R and EPOR) | | | | | |
| Granulocyte colony-stimulating factor | Q99062 | 628 | 650 | 23 | 292 |
| receptor (also known as G-CSF-R, GCSFR, | | | | | |
| and CD114) | | | | | |
| Granulocyte-macrophage colony-stimulating | P15509 | 321 | 346 | 26 | 293 |
| factor receptor subunit alpha (also known as | | | | | |
| GM-CSF-R-alpha and CD116) | | | | | |
| Interferon alpha/beta receptor 1 (also known | P17181 | 437 | 457 | 21 | 294 |
| as IFN-R1 and IFNA/B-R1) | | | | | |
| Interferon alpha/beta receptor 2 (also known | P48551 | 244 | 264 | 21 | 295 |
| as IFN-R2 and IFNA/B-R2) | | | | | |
| Interferon lambda receptor 1 (also known as | Q8IU57 | 229 | 249 | 21 | 296 |
| IL-28RA and IFN-lambda-R1) | | | | | |
| Interleukin-1 receptor accessory protein (also | Q9NPH3 | 368 | 388 | 21 | 297 |
| known as IL-1R3 and IL-1RAP) | | | | | |
| Interleukin-1 receptor type 1 (also known as | P14778 | 337 | 356 | 20 | 298 |
| IL-1R1, IL-1RA and CD121A) | | | | | |
| Interleukin-1 receptor-like 1 (also known as | Q01638 | 329 | 349 | 21 | 299 |
| 5T2 and IL-1RL1) | | | | | |
| Interleukin-1 receptor-like 2 (also known as | Q9HB29 | 336 | 356 | 21 | 300 |
| IL-36R and IL-1RL2) | | | | | |
| Interleukin-11 receptor subunit alpha (also | Q14626 | 371 | 391 | 21 | 301 |
| known as IL-11RA) | | | | | |
| Interleukin-12 receptor subunit beta-1 (also | P42701 | 546 | 570 | 25 | 302 |
| known as IL-12RB1 and CD212) | | | | | |
| Interleukin-12 receptor subunit beta-2 (also | Q99665 | 623 | 643 | 21 | 303 |
| known as IL-12RB2) | | | | | |
| Interleukin-17 receptor A (also known as IL- | Q96F46 | 321 | 341 | 21 | 304 |
| 17RA and CD217) | | | | | |
| Interleukin-17 receptor B (also known as IL- | Q9NRM6 | 293 | 313 | 21 | 305 |
| 17RB) | | | | | |
| Interleukin-17 receptor C (also known as IL- | Q8NAC3 | 539 | 559 | 21 | 306 |
| 17RC) | | | | | |
| Interleukin-17 receptor E (also known as IL- | Q8NFR9 | 455 | 475 | 21 | 307 |
| 17RE) | | | | | |
| Interleukin-18 receptor 1 (also known as IL- | Q13478 | 330 | 350 | 21 | 308 |
| 18R1, IL-1RRP, and CD218A) | | | | | |
| Interleukin-18 receptor accessory protein | O95256 | 357 | 377 | 21 | 309 |
| (also known as IL-18RB, IL-1-R7, and | | | | | |
| CD218B) | | | | | |
| Interleukin-2 receptor subunit beta (also | P14784 | 241 | 265 | 25 | 310 |
| known as IL-2RB, IL-15RB, and CD122) | | | | | |
| Interleukin-21 receptor (also known as IL- | Q9HBE5 | 233 | 253 | 21 | 311 |
| 21R and CD360) | | | | | |
| Interleukin-22 receptor subunit alpha-1 (also | Q8N6P7 | 229 | 249 | 21 | 312 |
| known as IL-22RA1) | | | | | |
| Interleukin-23 receptor (also known as IL- | Q5VWK5 | 356 | 376 | 21 | 313 |
| 23R) | | | | | |
| Interleukin-27 receptor subunit alpha (also | Q6UWB1 | 517 | 537 | 21 | 314 |
| known as IL-27RA and WSX-1) | | | | | |
| Interleukin-3 receptor subunit alpha (also | P26951 | 306 | 325 | 20 | 315 |
| known as IL-3RA and CD123) | | | | | |
| Interleukin-6 receptor subunit beta (also | P40189 | 620 | 641 | 22 | 316 |
| known as IL-6RB, gp130, and CD130) | | | | | |
| Interleukin-7 receptor subunit alpha (also | P16871 | 240 | 264 | 25 | 317 |
| known as IL-7RA and CD127) | | | | | |
| Leukemia inhibitory factor receptor (also | P42702 | 834 | 858 | 25 | 318 |
| known as LIF-R and CD118) | | | | | |
| Macrophage colony-stimulating factor 1 | P07333 | 518 | 538 | 21 | 319 |
| receptor (also known as M-CSF-R, CSF-1R, | | | | | |
| CSF1R, and CD115) | | | | | |
| Oncostatin-M-specific receptor subunit beta | Q99650 | 741 | 761 | 21 | 320 |
| (also known as OSM-RB and IL-31RB) | | | | | |
| Epidermal growth factor receptor (also | P00533 | 646 | 668 | 23 | 321 |
| known as EGFR and Her1) | | | | | |
| Growth hormone receptor (also known as | P10912 | 265 | 288 | 24 | 322 |
| GHR and GH receptor) | | | | | |
| Insulin receptor (also known as IR and | P06213 | 957 | 979 | 23 | 323 |
| CD220) | | | | | |
| Leptin receptor (also known as LEP-R, OB- | P48357 | 840 | 862 | 23 | 324 |
| R, and CD295) | | | | | |
| Prolactin receptor (also known as PRL-R) | P16471 | 235 | 258 | 24 | 325 |
| Thrombopoietin receptor (also known as | P40238 | 492 | 513 | 22 | 326 |
| TPO-R, c-Mpl, and CD110) | | | | | |
| Epidermal growth factor receptor (also | P00533 | 646 | 668 | 23 | 327 |
| known as EGFR and ErbB1) | | | | | |
| Receptor tyrosine-protein kinase erbB-2 | P04626 | 653 | 675 | 23 | 328 |
| (also known as HER2, Neu and ErbB2) | | | | | |
| Hepatocyte growth factor receptor (also | P08581 | 933 | 955 | 23 | 329 |
| known as HGFR and c-Met) | | | | | |
| Fibroblast growth factor receptor 1 (also | P11362 | 377 | 397 | 21 | 330 |
| known as FGFR1 and CD331) | | | | | |
| Fibroblast growth factor receptor 2 (also | P21802 | 378 | 398 | 21 | 331 |
| known as FGFR2 and CD332) | | | | | |
| Fibroblast growth factor receptor 3 (also | P22607 | 376 | 396 | 21 | 332 |
| known as FGFR3 and CD333) | | | | | |
| Fibroblast growth factor receptor 4 (also | P22455 | 370 | 390 | 21 | 333 |
| known as FGFR4 and CD334) | | | | | |
| Vascular endothelial growth factor receptor 2 | P35968 | 765 | 785 | 21 | 334 |
| (also known as VEGFR-2 and CD309) | | | | | |
| Vascular endothelial growth factor receptor 3 | P35916 | 776 | 796 | 21 | 335 |
| (also known as VEGFR-3) | | | | | |
| Ephrin type-A receptor 1 (also known as | P21709 | 548 | 568 | 21 | 336 |
| EPHA1 and EPH) | | | | | |
| Ephrin type-B receptor 1 (also known as | P54762 | 541 | 563 | 23 | 337 |
| EPHB1, EK6, and ELK) | | | | | |
| Platelet-derived growth factor receptor alpha | P16234 | 529 | 549 | 21 | 338 |
| (also known as PDGFRA and CD140a) | | | | | |
| Platelet-derived growth factor receptor beta | P09619 | 533 | 553 | 21 | 339 |
| (also known as PDGFRB and CD140b) | | | | | |
| B-cell antigen receptor complex-associated | P11912 | 144 | 165 | 22 | 340 |
| protein alpha chain (also known as Ig-alpha | | | | | |
| and CD79A) | | | | | |
| B-cell antigen receptor complex-associated | P40259 | 160 | 180 | 21 | 341 |
| protein beta chain (also known as Ig-beta and | | | | | |
| CD79B) | | | | | |
| CD160 antigen (also known as CD160 and | O95971 | 163 | 182 | 20 | 342 |
| CD160) | | | | | |
| CD226 antigen (also known as DNAM-1 and | Q15762 | 255 | 275 | 21 | 343 |
| CD226) | | | | | |
| CD83 antigen (also known as CD83) | Q01151 | 145 | 166 | 22 | 344 |
| Inducible T-cell costimulator (also known as | Q9Y6W8 | 141 | 161 | 21 | 345 |
| ICOS and CD278) | | | | | |
| Intercellular adhesion molecule 1 (also | P05362 | 481 | 503 | 23 | 346 |
| known as ICAM-1 and CD54) | | | | | |
| Intercellular adhesion molecule 2 (also | P13598 | 224 | 248 | 25 | 347 |
| known as ICAM-2 and CD102) | | | | | |
| Intercellular adhesion molecule 3 (also | P32942 | 486 | 510 | 25 | 348 |
| known as ICAM-3 and CD50) | | | | | |
| Killer cell immunoglobulin-like receptor | Q99706 | 243 | 263 | 21 | 349 |
| 2DL4 (also known as KIR2DL, and | | | | | |
| CD158D) | | | | | |
| Killer cell immunoglobulin-like receptor | Q14954 | 246 | 264 | 19 | 350 |
| 2DS1 (also known as KIR2DS1 and | | | | | |
| CD158H) | | | | | |
| Killer cell immunoglobulin-like receptor | P43631 | 246 | 265 | 20 | 351 |
| 2DS2 (also known as KIR2DS2 and | | | | | |
| CD158J) | | | | | |
| Killer cell immunoglobulin-like receptor | Q14952 | 246 | 264 | 19 | 352 |
| 2DS3 (also known as KIR2DS3) | | | | | |
| Killer cell immunoglobulin-like receptor | P43632 | 246 | 265 | 20 | 353 |
| 2DS4 (also known as KIR2DS4 and | | | | | |
| CD158I) | | | | | |
| Killer cell immunoglobulin-like receptor | Q14953 | 246 | 264 | 19 | 354 |
| 2DS50 (also known as KIR2DS5 and | | | | | |
| CD158G) | | | | | |
| Killer cell immunoglobulin-like receptor | Q14943 | 341 | 360 | 20 | 355 |
| 3DS1 (also known as KIR3DS1) | | | | | |
| Natural cytotoxicity triggering receptor 1 | O76036 | 259 | 279 | 21 | 356 |
| (also known as NKp46, Ly94, and CD335) | | | | | |
| Natural cytotoxicity triggering receptor 2 | O95944 | 193 | 213 | 21 | 357 |
| (also known as NKp44 and CD336) | | | | | |
| Natural cytotoxicity triggering receptor 3 | O14931 | 136 | 156 | 21 | 358 |
| (also known as NKp30 and CD337) | | | | | |
| T-cell antigen CD7 (also known as CD7) | P09564 | 181 | 201 | 21 | 359 |
| T-cell surface glycoprotein CD4 (also known | P01730 | 397 | 418 | 22 | 360 |
| as CD4) | | | | | |
| T-cell-specific surface glycoprotein CD28 | P10747 | 153 | 179 | 27 | 361 |
| (also known as CD28) | | | | | |
| Transmembrane and immunoglobulin | Q96BF3 | 151 | 171 | 21 | 362 |
| domain-containing protein 2 (also known as | | | | | |
| TMIGD2, CD28H, IGPR-1) | | | | | |
| Intercellular adhesion molecule 5 (also | Q9UMF0 | 836 | 856 | 21 | 363 |
| known as ICAM-5, telencephalin) | | | | | |
| Integrin alpha-L (also known as LFA-1A and | P20701 | 1091 | 1111 | 21 | 364 |
| CD11A) | | | | | |
| Integrin beta-2 (also known as LFA-1B and | P05107 | 701 | 723 | 23 | 365 |
| CD18) | | | | | |
| Cytotoxic and regulatory T-cell molecule | O95727 | 288 | 308 | 21 | 366 |
| (also known as CRTAM and CD355) | | | | | |
| B-cell receptor CD22 (also known as Siglec- | P20273 | 688 | 706 | 19 | 367 |
| 2 and CD22) | | | | | |
| Sialic acid-binding Ig-like lectin 14 (also | Q08ET2 | 359 | 381 | 23 | 368 |
| known as Siglec-14) | | | | | |
| Sialic acid-binding Ig-like lectin 15 (also | Q6ZMC9 | 264 | 284 | 21 | 369 |
| known as Siglec-15) | | | | | |
| Sialic acid-binding Ig-like lectin 16 (also | A6NMB1 | 435 | 455 | 21 | 370 |
| known as Siglec-16) | | | | | |
| Hepatitis A virus cellular receptor 1 (also | Q96D42 | 296 | 316 | 21 | 371 |
| known as TIM-1, KIM-1, and CD365) | | | | | |
| Toll-like receptor 1 (also known as TLR1 | Q15399 | 581 | 601 | 21 | 372 |
| and CD281) | | | | | |
| Toll-like receptor 10 (also known as TLR10 | Q9BXR5 | 577 | 597 | 21 | 373 |
| and CD290) | | | | | |
| Toll-like receptor 2 (also known as TLR2 | O60603 | 589 | 609 | 21 | 374 |
| and CD282) | | | | | |
| Toll-like receptor 3 (also known as TLR3 | O15455 | 705 | 725 | 21 | 375 |
| and CD283) | | | | | |
| Toll-like receptor 4 (also known as TLR4 | O00206 | 632 | 652 | 21 | 376 |
| and CD284) | | | | | |
| Toll-like receptor 5 (also known as TLR5 | O60602 | 640 | 660 | 21 | 377 |
| and CD285) | | | | | |
| Toll-like receptor 6 (also known as TLR6 | Q9Y2C9 | 587 | 607 | 21 | 378 |
| and CD286) | | | | | |
| Toll-like receptor 7 (also known as TLR7 | Q9NYK1 | 840 | 860 | 21 | 379 |
| and CD287) | | | | | |
| Toll-like receptor 8 (also known as TLR8 | Q9NR97 | 828 | 848 | 21 | 380 |
| and CD288) | | | | | |
| Toll-like receptor 9 (also known as TLR9 | Q9NR96 | 819 | 839 | 21 | 381 |
| and CD289) | | | | | |
| CD27 antigen (also known as CD27) | P26842 | 192 | 212 | 21 | 382 |
| Tumor necrosis factor receptor superfamily | Q9Y6Q6 | 213 | 233 | 21 | 383 |
| member 11A (also known as RANK and | | | | | |
| CD265) | | | | | |
| Tumor necrosis factor receptor superfamily | Q9NP84 | 81 | 101 | 21 | 384 |
| member 12A (also known as TweakR, FN14 | | | | | |
| and CD266) | | | | | |
| Tumor necrosis factor receptor superfamily | O14836 | 166 | 186 | 21 | 385 |
| member 13B (also known as TACI and | | | | | |
| CD267) | | | | | |
| Tumor necrosis factor receptor superfamily | Q96RJ3 | 79 | 99 | 21 | 386 |
| member 13C (also known as BAFF-R and | | | | | |
| CD268) | | | | | |
| Tumor necrosis factor receptor superfamily | Q92956 | 203 | 223 | 21 | 387 |
| member 14 (also known as HVEM and | | | | | |
| CD270) | | | | | |
| Tumor necrosis factor receptor superfamily | P08138 | 251 | 272 | 22 | 388 |
| member 16 (also known as NGF-R, | | | | | |
| p75NTR, and CD271) | | | | | |
| Tumor necrosis factor receptor superfamily | Q02223 | 55 | 77 | 23 | 389 |
| member 17 (also known as BCMA and | | | | | |
| CD269) | | | | | |
| Tumor necrosis factor receptor superfamily | Q9Y5U5 | 163 | 183 | 21 | 390 |
| member 18 (also known as GITR and | | | | | |
| CD3 57) | | | | | |
| Tumor necrosis factor receptor superfamily | Q9NS68 | 171 | 191 | 21 | 391 |
| member 19 (also known as TROY and | | | | | |
| IRADE) | | | | | |
| Tumor necrosis factor receptor superfamily | Q969Z4 | 163 | 183 | 21 | 392 |
| member 19L (also known as RELT) | | | | | |
| Tumor necrosis factor receptor superfamily | P19438 | 212 | 232 | 21 | 393 |
| member lA (also known as TNF-RI and | | | | | |
| CD120A) | | | | | |
| Tumor necrosis factor receptor superfamily | P20333 | 258 | 287 | 30 | 394 |
| member 1B (also known as TNF-RII and | | | | | |
| CD120B) | | | | | |
| Tumor necrosis factor receptor superfamily | Q93038 | 200 | 220 | 21 | 395 |
| member 25 (also known as DR3 and | | | | | |
| TRAMP) | | | | | |
| Tumor necrosis factor receptor superfamily | Q9HAV5 | 139 | 159 | 21 | 396 |
| member 27 (also known as XEDAR and | | | | | |
| EDA-A2 receptor) | | | | | |
| Tumor necrosis factor receptor superfamily | P36941 | 228 | 248 | 21 | 397 |
| member 3 (also known as LTB-R and TNF- | | | | | |
| RIII) | | | | | |
| Tumor necrosis factor receptor superfamily | P43489 | 215 | 235 | 21 | 398 |
| member 4 (also known as OX-40 and | | | | | |
| CD134) | | | | | |
| Tumor necrosis factor receptor superfamily | P25942 | 194 | 215 | 22 | 399 |
| member 5 (also known as CD40) | | | | | |
| Tumor necrosis factor receptor superfamily | P28908 | 386 | 406 | 21 | 400 |
| member 8 (also known as CD30) | | | | | |
| Tumor necrosis factor receptor superfamily | Q07011 | 187 | 213 | 27 | 401 |
| member 9 (also known as 4-1BB and | | | | | |
| CD137) | | | | | |
| Tumor necrosis factor receptor superfamily | Q9UNE0 | 188 | 208 | 21 | 402 |
| member EDAR (also known as EDAR) | | | | | |
| Linker for activation of T-cells family | O43561 | 5 | 27 | 23 | 403 |
| member 1 (also known as LAT) | | | | | |
| Linker for activation of T-cells family | Q9GZY6 | 6 | 26 | 21 | 404 |
| member 2 (also known as LAT2, NTAL, and | | | | | |
| LAB) | | | | | |
| Lymphocyte transmembrane adapter 1 (also | Q8IWV1 | 38 | 58 | 21 | 405 |
| known as LAX) | | | | | |
| Phosphoprotein associated with | Q9NWQ8 | 17 | 37 | 21 | 406 |
| glycosphingolipid-enriched microdomains 1 | | | | | |
| (also known as PAG and CBP) | | | | | |
| Linker for activation of T-cells family | O43561 | 5 | 27 | 23 | 407 |
| member 1 (also known as LAT) | | | | | |
| Low affinity immunoglobulin epsilon Fc | P06734 | 22 | 47 | 26 | 408 |
| receptor (also known as FCERII and CD23) | | | | | |
| CD209 antigen (also known as DC-SIGN, | Q9NNX6 | 38 | 58 | 21 | 409 |
| CLEC-4L, and CD209) | | | | | |
| C-type lectin domain family 1 member B | Q9P126 | 34 | 54 | 21 | 410 |
| (also known as CLEC-2) | | | | | |
| C-type lectin domain family 7 member A | Q9BXN2 | 45 | 65 | 21 | 411 |
| (also known as Dectin-1 and CLEC-7A) | | | | | |
| C-type lectin domain family 9 member A | Q6UXN8 | 36 | 56 | 21 | 412 |
| (also known as DNGR-1 and CD370) | | | | | |
| Killer cell lectin-like receptor subfamily F | Q9NZS2 | 39 | 59 | 21 | 413 |
| member 1 (also known as NKp80, KLRF1, | | | | | |
| and CLEC5C) | | | | | |
| Killer cell lectin-like receptor subfamily F | D3W0D1 | 31 | 51 | 21 | 414 |
| member 2 (also known as NKp65 and | | | | | |
| KLRF2) | | | | | |
| NKG2-C type II integral membrane protein | P26717 | 71 | 93 | 23 | 415 |
| (also known as NKG2C, KLRC2, and | | | | | |
| CD159C) | | | | | |
| NKG2-D type II integral membrane protein | P26718 | 52 | 72 | 21 | 416 |
| (also known as NKG2D and CD314) | | | | | |
| NKG2-E type II integral membrane protein | Q07444 | 71 | 93 | 23 | 417 |
| (also known as NKG2E and KLRC3) | | | | | |
| C-type lectin domain family 4 member E | Q9ULY5 | 20 | 40 | 21 | 418 |
| (also known as CLEC-4E and MINCLE) | | | | | |
| C-type lectin domain family 6 member A | Q6EIG7 | 21 | 41 | 21 | 419 |
| (also known as CLEC-6A and Dectin-2) | | | | | |
| C-type lectin domain family 10 member A | Q8IUN9 | 40 | 60 | 21 | 420 |
| (also known as CLEC-10A, MGL, and | | | | | |
| CD301) | | | | | |
| C-type lectin domain family 4 member D | Q8WXI8 | 18 | 38 | 21 | 421 |
| (also known as CLEC-4D, CLEC-6, Dectin- | | | | | |
| 3, and CD368) | | | | | |
| C-type lectin domain family 4 member C | Q8WTT0 | 22 | 44 | 23 | 422 |
| (also known as CLEC-4C, BDCA-2, and | | | | | |
| CD303) | | | | | |
| C-type lectin domain family 17, member A | Q6ZS10 | 173 | 193 | 21 | 423 |
| (also known as CLEC-17A and Prolectin) | | | | | |
| CD70 antigen (also known as CD70) | P32970 | 18 | 38 | 21 | 424 |
| Tumor necrosis factor ligand superfamily | O43557 | 38 | 58 | 21 | 425 |
| member 14 (also known as LIGHT and | | | | | |
| CD258) | | | | | |
| Tumor necrosis factor ligand superfamily | P32971 | 38 | 62 | 25 | 426 |
| member 8 (also known as CD30L and | | | | | |
| CD153) | | | | | |
| Tumor necrosis factor (also known as tumor | P01375 | 36 | 56 | 21 | 427 |
| necrosis factor, TNFa, and TNFSF1A) | | | | | |
| Tumor necrosis factor ligand superfamily | P23510 | 24 | 50 | 27 | 428 |
| member 4 (also known as OX40L, CD252, | | | | | |
| CD134L, and CD252) | | | | | |
| CD40 ligand (also known as CD40L, | P29965 | 23 | 46 | 24 | 429 |
| CD154, and CD154) | | | | | |
| Tumor necrosis factor ligand superfamily | P48023 | 81 | 102 | 22 | 430 |
| member 6 (also known as FasL, CD178, | | | | | |
| CD95L, and CD178) | | | | | |
| Tumor necrosis factor ligand superfamily | P41273 | 29 | 49 | 21 | 431 |
| member 9 (also known as 4-1BBL and | | | | | |
| CD137L) | | | | | |
| Tumor necrosis factor ligand superfamily | P50591 | 18 | 38 | 21 | 432 |
| member 10 (also known as TRAIL, TNF- | | | | | |
| related apoptosis-inducing ligand, CD253, | | | | | |
| APO-2L, and CD253) | | | | | |
| Tumor necrosis factor ligand superfamily | O14788 | 48 | 68 | 21 | 433 |
| member 11 (also known as TRANCE, | | | | | |
| RANKL, CD254, OPGL, and CD254) | | | | | |
| Tumor necrosis factor ligand superfamily | O43508 | 22 | 42 | 21 | 434 |
| member 12 (also known as TWEAK, APO- | | | | | |
| 3L, and DR3L) | | | | | |
| Tumor necrosis factor ligand superfamily | O75888 | 29 | 49 | 21 | 435 |
| member 13 (also known as APRIL, CD256, | | | | | |
| TALL-2, TRDL1, and CD256) | | | | | |
| Tumor necrosis factor ligand superfamily | Q9Y275 | 47 | 67 | 21 | 436 |
| member 13B (also known as BAFF, B-Cell | | | | | |
| Activating Factor, CD257, TALL-1, and | | | | | |
| CD257) | | | | | |
| Tumor necrosis factor ligand superfamily | Q9UNG2 | 51 | 71 | 21 | 437 |
| member 18 (also known as TNFSF18, | | | | | |
| GITRL, and TL-6) | | | | | |
| Paired immunoglobulin-like type 2 receptor | Q9UKJ0 | 192 | 212 | 21 | 534 |
| beta (also known as PILRB) | | | | | |

[0280] In some embodiments, an engineered protein (e.g., chimeric protein) provided herein includes a transmembrane domain comprising or consisting of an amino acid sequence having at least 90%, at least 91%, at least 92%, at least 93%, at least 94%, at least 95%, at least 96%, at least 97%, at least 98%, at least 99% or 100% identity with the amino acid sequence of any one of SEQ ID NOs: 264-437 and 534.

[0281] In some embodiments, an engineered protein (e.g., chimeric protein) provided herein includes a transmembrane domain selected from a human CD8alpha transmembrane domain, a human CD16 transmembrane domain, a human CD28 transmembrane domain, a human NKG2D transmembrane domain, a human NKp44 transmembrane domain, a human NKp46 transmembrane domain, a human CD27 transmembrane domain, a human DAP10 transmembrane domain, a PILRB transmembrane domain, and a human DAP12 transmembrane domain, or a portion of any of the foregoing.

[0282] Alternatively, the transmembrane domain of an engineered protein (e.g., chimeric protein) provided herein can be synthetic, and can comprise hydrophobic residues such as, e.g., leucine and valine. In some embodiments, a triplet of phenylalanine, tryptophan, and valine is found at one or both termini of a synthetic transmembrane domain of an engineered protein (e.g., chimeric protein) provided herein.

[0283] In some embodiments, a short polypeptide linker, e.g., between 2 and 10 amino acids in length, may form a linkage between the transmembrane domain and the intracellular domain of an engineered protein (e.g., chimeric protein) provided herein. In some embodiments, the linker is a glycine-serine linker. Any of the linkers described herein may be included in the engineered protein (e.g., chimeric protein).

[0284] In some embodiments, an engineered protein (e.g., chimeric protein) provided herein includes a transmembrane domain derived from human DAP10 comprising an amino acid sequence having at least 90%, at least 91%, at least 92%, at least 93%, at least 94%, at least 95%, at least 96%, at least 97%, at least 98%, at least 99%, or 100% identity with the amino acid sequence of SEQ ID NO: 264.

[0285] In some embodiments, an engineered protein (e.g., chimeric protein) provided herein includes a transmembrane domain derived from a human DAP12 comprising an amino acid sequence having at least 90%, at least 91%, at least 92%, at least 93%, at least 94%, at least 95%, at least 96%, at least 97%, at least 98%, at least 99%, or 100% identity with the amino acid sequence of SEQ ID NO: 266.

[0286] D. Linkers

[0287] The term “linker” as used herein refers to any polypeptide that functions to link one or more domains of an engineered protein (e.g., chimeric protein) provided herein (e.g., a transmembrane domain to an extracellular domain and/or an intracellular domain in an engineered protein (e.g., chimeric protein) of the disclosure). In particular, linkers may be used to provide more flexibility and accessibility for the functioning of the extracellular domain, the transmembrane domain, and/or the intracellular domain. A linker can also be used to separate two different intracellular domains.

[0288] A linker useful in the engineered proteins (e.g., chimeric proteins) herein may comprise from about 1 to about 200 amino acids, from about 1 to about 10 amino acids, from about 10 to about 100 amino acids, from about 100 to about 200 amino acids, from about 10 to about 20 amino acids, from about 20 to about 30 amino acids, from about 30 to about 40 amino acids, from about 40 to about 50 amino acids, from about 50 to about 70 amino acids, from about 70 to about 90 amino acids, from about 90 to about 120 amino acids, from about 100 to about 150 amino acids, or from about 150 to about 200 amino acids, in length.

[0289] In some embodiments, the transmembrane domain and the extracellular domain are connected by a linker. In some embodiments, the linker establishes an optimal distance to facilitate the functioning of the extracellular domain. In some embodiments, the linker provides flexibility for the extracellular domain to bind to a negative signal.

[0290] In some embodiments, the transmembrane domain and the intracellular domain are connected by a linker. In some embodiments, the linker establishes an optimal distance to facilitate the functioning of the intracellular domain. In some embodiments, the linker provides flexibility for the intracellular domain to transduce a effector function signal in the cell, which in some embodiments is to induce a positive signal that activates an immune cell.

[0291] In some embodiments, the linker is selected from the linkers presented in Table 3.

TABLE 3
Exemplary Linkers

| | | SEQ |
|---|---|---|
| | | ID |
| Linker name | Amino acid sequence | NO: |
| CD8a hinge | TTTPAPRPPTPAPTIASQPLSLRPEACRPAAGGAVHTRGLDFACD | 438 |
| short | | |
| CD8a hinge | FVPVFLPAKPTTTPAPRPPTPAPTIASQPLSLRPEACRPAAGGAVH | 439 |
| long | TRGLDFACD | |
| IgG1 hinge | EPKSCDKTHTCPPCPAPELLGGPSVFLFPPKPKDTLMISRTPEVTC | 440 |
| | VVVDVSHEDPEVKFNWYVDGVEVHNAKTKPREEQYNSTYRVVS | |
| | VLTVLHQDWLNGKEYKCKVSNKALPAPIEKTISKAKGQPREPQV | |
| | YTLPPSRDELTKNQVSLTCLVKGFYPSDIAVEWESNGQPENNYKT | |
| | TPPVLDSDGSFFLYSKLTVDKSRWQQGNVFSCSVMHEALHNHYT | |
| | QKSLSLSPGK | |
| IgG1 hinge | EPKSPDKTHTCPPCPAPELLGGPSVFLFPPKPKDTLMISRTPEVTC | 441 |
| v2 | VVVDVSHEDPEVKFNWYVDGVEVHNAKTKPREEQYNSTYRVVS | |
| | VLTVLHQDWLNGKEYKCKVSNKALPAPIEKTISKAKGQPREPQV | |
| | YTLPPSRDELTKNQVSLTCLVKGFYPSDIAVEWESNGQPENNYKT | |
| | TPPVLDSDGSFFLYSKLTVDKSRWQQGNVESCSVMHEALHNHYT | |
| | QKSLSLSPGKKDPK | |
| CD28 hinge | IEVMYPPPYLDNEKSNGTIIHVKGKHLCPSPLFPGPSKP | 442 |
| KIR2DS2 | SPTEPSSKTGNPRHLH | 443 |
| hinge | | |
| IgG4 hinge | ESKYGPPCPSCP | 444 |
| short | | |
| IgG4 hinge | ESKYGPPCPSCPAPEFLGGPSVFLFPPKPKDTLMISRTPEVTCVVV | 445 |
| | DVSQEDPEVQFNWYVDGVEVHNAKTKPREEQFNSTYRVVSVLT | |
| | VLHQDWLNGKEYKCKVSNKGLPSSIEKTISKAKGQPREPQVYTL | |
| | PPSQEEMTKNQVSLTCLVKGFYPSDIAVEWESNGQPENNYKTTPP | |
| | VLDSDGSFFLYSRLTVDKSRWQEGNVFSCSVMHEALHNHYTQK | |
| | SLSLSLGK | |
| CD16_Hinge | GLAVSTISSFFPPGYQ | 446 |
| 651 G4S x1 | GGGGS | 447 |
| G4S x2 | GGGGSGGGGS | 448 |
| 652 G4S x3 | GGGGSGGGGSGGGGS | 449 |
| 653 | GGSGGSGGYPYDVPDYAGGGSGGGS | 450 |
| 654 | GGSGGSGGGGGSGGGSGGGSGGGS | 451 |
| 655 | GGSGGSGGGPEDEPGSGSGGGSGGGS | 452 |
| 656 | GGSGGSGGGGGSGGGSGGGSGGGSGSGSGSGSEDGSGSGSGS | 453 |
| 657 | GSGSGSGSGSEDEDEDEDGSGSGSGSGS | 454 |
| 658 | S | 455 |
| 659 | GSGSGSGSEDGSGSGSGS | 456 |
| 660 | GSGSGSGSGSGSGSGSGS | 457 |
| 661 | GCGGSGGGGSGGGGS | 458 |
| 654 | GGSGGSGGGGGSGGGSGGGSGGGS | 459 |
| 662 | SGRGGGGSGGGGSGGGGSGGGGSSPA | 460 |
| 663 | GGGGSGGGGSGGGGSGGGGSGGGG | 461 |
| 664 | SGRGASSGSSGSGSQKKPRYEIRWKVVVISAILALVVLTVISLIILI | 462 |
| | MLWGSGMQSPA | |

[0292] In some embodiments, a linker in an engineered protein (e.g., chimeric protein) provided herein may be derived from all or part of a naturally occurring molecule, such as from all or part of the extracellular region of CD8, CD8alpha, CD4, CD28, 4-1BB, or IgG (in particular, the linker region of an IgG, for example from IgG1, IgG2 or IgG4), or from all or part of an antibody heavy-chain constant region. Alternatively, the linker may be a synthetic sequence that corresponds to a naturally occurring linker sequence or may be an entirely synthetic linker sequence. In some embodiments, the linker corresponds to Fc domains of a human immunoglobulin, e.g., either the CH2 or CH3 domain. In some embodiments, the CH2 and CH3 linker region of a human immunoglobulin has been modified to improve dimerization. In some embodiments, the linker is derived from an immunoglobulin. In some embodiments, the linker comprises or consists of a CH3 region of a human immunoglobulin. In some embodiments, the linker comprises or consists of a CH2 region of a human immunoglobulin. In some embodiments, the linker comprises or consists of a CH2 and CH3 region of a human immunoglobulin. In some embodiments, the CH2 region is from a human IgG1, IgG2 or IgG4 immunoglobulin.

[0293] In some embodiments, the linker is derived from a human CD8α chain (e.g., NP_001139345.1). In some embodiments, the linker of the engineered proteins (e.g., chimeric proteins) described herein comprises a subsequence of CD8α, an IgG1, an IgG4, FcγRIIIα, or CD28. In some embodiments, the linker is derived from the stalk domain of a human CD8α, a human IgG1, a human IgG4, a human FcγRIIIα, or a human CD28.

[0294] In some embodiments, an engineered protein (e.g., chimeric protein) provided herein includes one or more (e.g., one, two, three, four, or five) linkers disposed between an extracellular domain and a transmembrane domain, between a transmembrane domain and an intracellular domain, and/or between two or more intracellular domains). In some embodiments, an engineered protein (e.g., chimeric protein) provided herein includes one or more linkers, wherein the linker comprises an amino acid sequence having at least 90%, at least 91%, at least 92%, at least 93%, at least 94%, at least 95%, at least 96%, at least 97%, at least 98%, at least 99%, or 100% identity with the amino acid sequence of any one of SEQ ID NOs: 438-462.

[0295] Included in the scope of the disclosure are nucleic acid sequences that encode functional portions, e.g., one, two, or three domains, of the engineered proteins (e.g., chimeric proteins) described herein. Functional portions encompass, for example, those parts of an engineered protein (e.g., chimeric protein) that retain the ability to recognize negative signals, or to detect, treat, or prevent a disease. In some embodiments, the engineered proteins (e.g., chimeric proteins) provided herein include additional amino acid residues at the amino or carboxy terminus of the portion, or at both termini, which additional amino acids are not found in the amino acid sequence of the inhibitory polypeptide and/or stimulatory polypeptide from which the domains (e.g., extracellular domain and/or intracellular domain) in the engineered protein (e.g., chimeric protein) are derived.

[0296] The engineered proteins (e.g., chimeric proteins) described herein (including functional portions and functional variants thereof) may be glycosylated, amidated, carboxylated, phosphorylated, esterified, N-acylated, or cyclized (via, e.g., a disulfide bridge) proteins, or converted into acid addition salts and/or optionally dimerized or polymerized.

[0297] E. Signal Peptides

[0298] In some embodiments, an engineered protein (e.g., chimeric protein) provided herein includes a signal peptide (also known as a leader peptide). In some embodiments, the signal peptide is a type I membrane protein leader peptide. In some embodiments, the signal peptide is a type II membrane protein leader peptide. In some embodiments, an engineered protein (e.g., chimeric protein) provided herein includes a signal peptide at its amino terminus (N-terminus). In some embodiments, the engineered protein (e.g., chimeric protein) includes a signal peptide at the N-terminus of an extracellular domain. In some embodiments, the signal peptide is cleaved from the engineered protein (e.g., chimeric protein) during cellular processing and localization of the engineered protein to the cellular membrane (e.g., plasma membrane) of a cell expressing the protein. Exemplary signal peptides (e.g., derived from inhibitory polypeptides) that may be included in an engineered protein (e.g., chimeric protein) provided herein are listed in Table 18.

TABLE 18
Exemplary Signal Peptide Sequences

| | | | | Amino | SEQ |
|---|---|---|---|---|---|
| | | | | acid | ID |
| Inhibitory polypeptide | UNIPROT ID | Start | End | length | NO: |
| BTLA | Q7Z6A9 | 1 | 30 | 30 | 463 |
| CD160 | O95971 | 1 | 24 | 24 | 464 |
| CD200R | Q8TD46 | 1 | 28 | 28 | 465 |
| CD33 | P20138 | 1 | 17 | 17 | 466 |
| CEACAM-1 | P13688 | 1 | 34 | 34 | 467 |
| (also known as CD66a) | | | | | |
| CTLA-4 | P16410 | 1 | 35 | 35 | 468 |
| Fas | P25445 | 1 | 25 | 25 | 469 |
| FCRL6 | Q6DN72 | 1 | 19 | 19 | 470 |
| IL-10RA | Q13651 | 1 | 21 | 21 | 471 |
| IL-10RB | Q08334 | 1 | 19 | 19 | 472 |
| IL-6RA | P08887 | 1 | 19 | 19 | 473 |
| IL-6RB (also known as | P40189 | 1 | 22 | 22 | 474 |
| gp130 and CD130) | | | | | |
| KIR2DL1 | P43626 | 1 | 21 | 21 | 475 |
| KIR2DL2 | P43627 | 1 | 21 | 21 | 476 |
| KIR2DL3 | P43628 | 1 | 21 | 21 | 477 |
| KIR2DL5A | Q8N109 | 1 | 21 | 21 | 478 |
| KIR2DL5B | Q8NHK3 | 1 | 21 | 21 | 479 |
| KIR3DL1 | P43629 | 1 | 21 | 21 | 480 |
| KIR3DL2 | P43630 | 1 | 21 | 21 | 481 |
| KIR3DL3 | Q8N743 | 1 | 25 | 25 | 482 |
| Lag3 | P18627 | 1 | 22 | 22 | 483 |
| LILRB1 | Q8NHL6 | 1 | 23 | 23 | 484 |
| LILRB2 | Q8N423 | 1 | 21 | 21 | 485 |
| LILRB3 | O75022 | 1 | 23 | 23 | 486 |
| LILRB4 | Q8NHJ6 | 1 | 21 | 21 | 487 |
| LILRB5 | O75023 | 1 | 23 | 23 | 488 |
| NKp30c | O14931-2 | 1 | 18 | 18 | 489 |
| PD-1 | Q15116 | 1 | 23 | 23 | 490 |
| Siglec-10 | Q96LC7 | 1 | 16 | 16 | 491 |
| Siglec-7 | Q9Y286 | 1 | 18 | 18 | 492 |
| Siglec-9 | Q9Y336 | 1 | 17 | 17 | 493 |
| TACTILE | P40200 | 1 | 21 | 21 | 494 |
| (also known as CD96) | | | | | |
| TGF-BR1 | P36897 | 1 | 33 | 33 | 495 |
| TGF-BR2 | P37173 | 1 | 22 | 22 | 496 |
| TIGIT | Q495A1 | 1 | 21 | 21 | 497 |
| TIM-3 | Q8TDQO | 1 | 21 | 21 | 498 |
| CD8α | P01732 | 1 | 21 | 21 | 676 |

[0299] In some embodiments, an engineered protein (e.g., chimeric protein) provided herein includes a signal peptide that is a signal peptide of a CD8 protein.

[0300] In some embodiments, an engineered protein (e.g., chimeric protein) provided herein includes a signal peptide comprising an amino acid sequence having at least 90%, at least 91%, at least 92%, at least 93%, at least 94%, at least 95%, at least 96%, at least 97%, at least 98%, at least 99%, or 100% identity with the amino acid sequence of any one of SEQ ID NOs: 463-498 and 676.

### F. Exemplary Engineered Protein Constructs

### Sinks

[0301] Exemplary engineered proteins (e.g., chimeric proteins) of the sink modality, nucleic acids encoding the engineered proteins (e.g., chimeric proteins), and cells, e.g., immune cells, comprising one or more of these engineered proteins (e.g., chimeric proteins), are provided herein. In some embodiments, the disclosure provides proteins that acts as a sink, wherein the protein comprises an extracellular domain and a transmembrane domain, and wherein the protein lacks a fully functional intracellular domain. The extracellular domain of the sink binds to a negative signal (e.g., any of the exemplary negative signals described herein an exogenous ligand that inhibits the activation of an immune response).

[0302] In some embodiments, the sink protein comprises a transmembrane domain and an extracellular domain from the same protein, e.g., the sink protein is a truncated protein lacking its intracellular domain or a portion of its intracellular domain. In some embodiments, the sink protein comprises a transmembrane domain and an extracellular domain that are from different proteins, i.e., the sink protein is a chimeric protein.

[0303] In some embodiments, the sink protein comprises a polypeptide sequence extending to include, in addition to the extracellular and transmembrane domains, between 1 and 15 additional amino acids of an intracellular domain (e.g., as defined by UNIPROT) of the protein from which the sink protein is derived (e.g., a wild-type inhibitory protein). In some embodiments, the transmembrane domain of a sink protein may comprise up to 5, up to 10, or up to 15 amino acid residues of the intracellular domain, i.e., the corresponding intracellular domain of the protein from which the transmembrane domain is derived. In some embodiments, a sink protein comprises a amino acid sequence extended to include, in addition to the extracellular and transmembrane domains, additional amino acids of the intracellular domain up to and including a charged amino acid residue at the terminus that is oriented towards the cytoplasm of a cell where the protein is expressed.

[0304] In some embodiments, the extracellular domain of the sink protein comprises the extracellular domain, or a portion thereof, of an inhibitory polypeptide that binds to a negative signal. In embodiments, the extracellular domain of the sink protein comprises the extracellular domain, or a portion thereof, of an inhibitory polypeptide presented in Table 1 or Table 1.1. In some embodiments, the extracellular domain of the sink protein consists of the extracellular domain, or a portion thereof, of an inhibitory polypeptide presented in Table 1 or Table 1.1. In some embodiments, the inhibitory polypeptide is selected from the inhibitory polypeptides presented in Table 1 or Table 1.1. In some embodiments, the inhibitory polypeptide is adenosine receptor A2A, adenosine receptor A2B, prostaglandin receptor EP2, prostaglandin receptor EP4, TGF-BR1, TGF-BR2, IL-10RA, IL-10RA, IL-1R8, IL-6RA, IL-10RA, IL-6RB (also known as gp130 and CD130), IL-10RA, PD-1, CTLA-4, TIM-3, Lag3, BTLA, CD160, TIGIT, TACTILE (also known as CD96), KIR2DL1, KIR2DL2, KIR2DL3, KIR2DL5A, KIR2DL5B, KIR3DL1, KIR3DL2, KIR3DL3, LILRB1, LILRB2, LILRB3, LILRB4, LILRB5, CEACAM-1 (CD66a), NKG2A, KLRB1 (NKR-P1A), KLRG1, CD33, Siglec-7, Siglec-9, Siglec-10, Fas, or FCRL6.

[0305] In some embodiments, the sink protein comprises a transmembrane domain and an extracellular domain from the same protein. In some embodiments, the sink protein is a truncated version of any inhibitory protein disclosed herein, wherein the inhibitory protein is lacking its entire intracellular domain or a portion of the intracellular domain. In some embodiments, the sink protein comprises the extracellular domain, or portion thereof, and the transmembrane domain, or portion thereof, of an inhibitory polypeptide that binds to a negative signal. In embodiments, the sink protein comprises the extracellular domain, or portion thereof, and the transmembrane domain, or portion thereof, of an inhibitory polypeptide presented in Table 1 or Table 1.1. In some embodiments, the sink protein consists of the extracellular domain, or portion thereof, and the transmembrane domain, or portion thereof, of an inhibitory polypeptide presented in Table 1 or Table 1.1. In some embodiments, the inhibitory polypeptide is adenosine receptor A2A, adenosine receptor A2B, prostaglandin receptor EP2, prostaglandin receptor EP4, TGF-BR1, TGF-BR2, IL-10RA, IL-10RB, IL-10RA, IL-1R8, IL-10RA, IL-6RA, IL-10RA, IL-6RB (also known as gp130 and CD130), IL-10RA, PD-1, I CTLA-4, TIM-3, Lag3, I BTLA, CD160, TIGIT, TACTILE (also known as CD96), CD200R, KIR2DL1, KIR2DL2, KIR2DL3, KIR2DL5A, KIR2DL5B, KIR3DL1, KIR3DL2, KIR3DL3, LILRB1, LILRB2, LILRB3, LILRB4, LILRB5, CEACAM-1 (CD66a), NKG2A, KLRB1 (NKR-P1A), KLRG1, CD33, Siglec-7, Siglec-9, Siglec-10, Fas, or FCRL6.

[0306] In some embodiments, the transmembrane domain and the extracellular domain of the sink protein are from different proteins, i.e., the sink protein is a chimeric protein. In some embodiments, the sink protein comprises an extracellular domain, or portion thereof, of a first inhibitory polypeptide that binds to a negative signal, and a transmembrane domain, or portion thereof, of a second inhibitory polypeptide that binds to a negative signal. In embodiments, the sink protein comprises an extracellular domain, or portion thereof, of a first inhibitory polypeptide presented in Table 1 or Table 1.1, and a transmembrane domain, or portion thereof, of a second inhibitory polypeptide presented in Table 1 or Table 1.1. In some embodiments, the sink protein consists of an extracellular domain, or portion thereof, of a first inhibitory polypeptide presented in Table 1 or Table 1.1, and a transmembrane domain, or portion thereof, of a second inhibitory polypeptide presented in Table 1 or Table 1.1. In some embodiments, the sink protein comprises an extracellular domain, or portion thereof, of an inhibitory polypeptide that binds to a negative signal, and a transmembrane domain, or portion thereof, of a stimulatory polypeptide. In some embodiments, the sink protein comprises an extracellular domain, or portion thereof, of an inhibitory polypeptide presented in Table 1 or Table 1.1, and a transmembrane domain, or portion thereof, of a stimulatory polypeptide presented in Table 2 or Table 2.1. In some embodiments, the sink protein consists of the extracellular domain, or portion thereof, of an inhibitory polypeptide presented in Table 1 or Table 1.1, and the transmembrane domain, or portion thereof, of a stimulatory polypeptide presented in Table 2 or Table 2.1.

[0307] In some embodiments, the extracellular domain of the sink protein comprises an antigen-binding domain that specifically binds to a negative signal. In some embodiments, the antigen-binding domain comprises a fragment of an antibody. In some embodiments, the antigen-binding domain comprises an scFv, a Fab, or a VHH. In some embodiments, the scFv is an scFv from a monoclonal antibody. In some embodiments, the scFv is connected to the transmembrane domain by a linker.

### Dominant Negative Receptors

[0308] Exemplary engineered proteins (e.g., chimeric proteins) of the dominant negative receptor (DNR) modality, nucleic acids encoding the engineered proteins (e.g., chimeric proteins), and cells, e.g., immune cells comprising one or more of these engineered proteins (e.g., chimeric proteins), are provided herein. In some embodiments, the disclosure provides dominant negative isoforms of a protein, wherein the dominant negative isoform of the protein competes with a wild-type isoform of the protein for binding a signal (e.g., a negative signal) that prevents the activation of an immune response. In some embodiments, the dominant negative isoform of a protein is a dominant negative isoform of an inhibitory polypeptide disclosed herein.

[0309] In some embodiments, the dominant negative isoform of a protein is an inhibitory polypeptide presented in Table 1 or Table 1.1, wherein at least one mutation or deletion has been introduced to produce a dominant negative isoform of the inhibitory polypeptide. In some embodiments, the dominant negative isoform of a protein is a dominant negative isoform of an inhibitory polypeptide presented in Table 1 or Table 1.1. In some embodiments, the inhibitory polypeptide is adenosine receptor A2A, adenosine receptor A2B, ITGF-BR1, TGF-BR2, IL-10RA, IL-1R8, IL-6RA, IL-6RB (gp130, CD130), PD-1, CTLA-4, Lag3, TACTILE (also known as CD96), or Fas.

[0310] In some embodiments, the chimeric protein comprises an extracellular domain of an inhibitory polypeptide presented in Table 1 or Table 1.1, and a transmembrane domain. In some embodiments, the chimeric protein comprises an extracellular domain comprising an amino acid sequence having at least 90%, at least 91%, at least 92%, at least 93%, at least 94%, at least 95%, at least 96%, at least 97%, at least 98%, at least 99%, or 100/sequence identity to the amino acid sequence of any one of SEQ ID NOs: 4-45, and a transmembrane domain (e.g., a transmembrane domain provided herein (e.g., a transmembrane domain of human CD28 or a transmembrane domain comprising an amino acid sequence having at least 90%, at least 91%, at least 92%, at least 93%, at least 94%, at least 95%, at least 96%, at least 97%, at least 98%, at least 99%, or 100% sequence identity to the amino acid sequence of any one of SEQ ID NOs: 223-263). In some embodiments, the chimeric protein comprises or consists of the extracellular domain and the transmembrane domain of an inhibitory polypeptide presented in Table 1 or Table 1.1. In some embodiments, the chimeric protein does not include an intracellular domain and/or an intracellular domain capable of providing a signal to a cell (e.g., an effector function signal).

[0311] Also provided herein are modified cells, e.g., immune cells (e.g., NK cells) engineered to comprise (e.g., express) a protein comprising a dominant negative isoform of TGF-BR1, wherein the dominant negative isoform of TGF-BR1 competes with a wild-type isoform of TGF-BR1 for binding a TGF-B (also known as TGF-β) signal that prevents the activation of an immune response. In some embodiments, the dominant negative isoform of TGF-BR1 is selected from the polypeptides described in Table 4.

TABLE 4
Exemplary Dominant Negative Receptors
Comprising a Dominant Negative
Isoform of TGF-BR1 (UNIPROT ID P36897)

| UNIPROT ID | Disease Phenotype | Mutation | SEQ ID NO: |
|---|---|---|---|
| P36897 | | Truncation of ICD | 538 |
| | | after amino acid | |
| | | residue 1147 | |
| P36897 | Loeys-Dietz syndrome 1 | K376E | 539 |
| P36897 | | K232R | 540 |
| P36897 | Loeys-Dietz syndrome 1 | T200I | 541 |
| P36897 | Loeys-Dietz syndrome 1 | K232E | 542 |
| P36897 | Loeys-Dietz syndrome 1 | S241L | 543 |
| P36897 | Loeys-Dietz syndrome 1 | M318R | 544 |
| P36897 | Loeys-Dietz syndrome 1 | G353V | 545 |
| P36897 | Loeys-Dietz syndrome 1 | D400G | 546 |
| P36897 | Loeys-Dietz syndrome 1 | R478P | 547 |

[0312] An exemplary polypeptide sequence of a TGF-BR1 polypeptide (also referred to herein as TGF-βR1) comprises or consists of the amino acid sequence of SEQ ID NO: 499. In some embodiments, the dominant negative isoform of TGF-BR1 comprises a truncation after an isoleucine at position 147 of SEQ ID NO: 499. In some embodiments, the dominant negative isoform of TGF-BR1 comprises a glutamate at position 376 of SEQ ID NO: 499. In some embodiments, the dominant negative isoform of TGF-BR1 comprises an arginine at position 232 of SEQ ID NO: 499. In some embodiments, the dominant negative isoform of TGF-BR1 comprises an isoleucine at position 200 of SEQ ID NO: 499. In some embodiments, the dominant negative isoform of TGF-BR1 comprises a glutamate at position 232 of SEQ ID NO: 499. In some embodiments, the dominant negative isoform of TGF-BR1 comprises a leucine at position 241 of SEQ ID NO: 499. In some embodiments, the dominant negative isoform of TGF-BR1 comprises an arginine at position 318 of SEQ ID NO: 499. In some embodiments, the dominant negative isoform of TGF-BR1 comprises a valine at position 353 of SEQ ID NO: 499. In some embodiments, the dominant negative isoform of TGF-BR1 comprises a glycine at position 400 of SEQ ID NO: 499. In some embodiments, the dominant negative isoform of TGF-BR1 comprises a proline at position 478 of SEQ ID NO: 499. In some embodiments, the dominant negative isoform of TGF-BR1 results in the development of one or more phenotypes associated with Loeys-Dietz syndrome 1 in a subject.

[0313] In some embodiments, the dominant negative isoform of TGF-BR1 comprises a polypeptide having at least 90%, at least 91%, at least 92%, at least 93%, at least 94%, at least 95%, at least 96%, at least 97%, at least 98%, at least 99%, or 100% sequence identity to the amino acid sequence of SEQ ID NO: 499, wherein the polypeptide comprises: a truncation after isoleucine at the amino acid position corresponding to position 147 of SEQ ID NO: 499, an arginine at the amino acid position corresponding to position 232 of SEQ ID NO: 499, an isoleucine at the amino acid position corresponding to position 200 of SEQ ID NO: 499, a glutamate at the amino acid position corresponding to position 232 of SEQ ID NO: 499, a leucine at the amino acid position corresponding to position 241 of SEQ ID NO: 499, an arginine at the amino acid position corresponding to position 318 of SEQ ID NO: 499, a valine at the amino acid position corresponding to position 353 of SEQ ID NO: 499, a glycine at the amino acid position corresponding to position 400 of SEQ ID NO: 499, or a proline at the amino acid position corresponding to position 478 of SEQ ID NO: 499. In some embodiments, the dominant negative isoform of TGF-BR1 results in the development of one or more phenotypes associated with Loeys-Dietz syndrome 1 in a subject.

[0314] Also provided herein are modified cells, e.g., immune cells engineered to express a protein comprising a dominant negative isoform of TGF-BR2, wherein the dominant negative isoform of TGF-BR2 competes with a wild-type isoform of TGF-BR2 for binding a TGF-B signal that prevents the activation of an immune response. In some embodiments, the dominant negative isoform of TGF-BR2 is selected from the polypeptides described in Table 5.

TABLE 5
Exemplary Dominant Negative Receptors
Comprising a Dominant Negative
Isoforms of TGF-BR2 (UNIPROT P37173)

| | | | OMIM ID/ | SEQ |
|---|---|---|---|---|
| | | | Ensembl SNP/ | ID |
| UNIPROT ID | Disease Phenotype | Mutation | ClinVar VCV | NO: |
| P37173 | None | Truncation | | 548 |
| | | of ICD | | |
| | | after Q194 | | |
| P37173 | None | Truncation | | 549 |
| | | of ICD | | |
| | | after Y187 | | |
| P37173 | Loeys-Dietz | R537C | 190182.0007/ | 550 |
| | Syndrome 2 | | rs104893809/ | |
| | | | VCV000012507 | |
| P37173 | Loeys-Dietz | R528H | 190182.0011/ | 551 |
| | Syndrome 2; Colon | | rs104893815/ | |
| | Cancer, Hereditary | | VCV000012511 | |
| | Nonpolyposis, | | | |
| | Type 6, Somatic, | | | |
| | Included | | | |
| P37173 | Loeys-Dietz | R528C | 190182.0012/ | 552 |
| | Syndrome 2 | | rs104893810/ | |
| | | | VCV000012512 | |
| P37173 | Loeys-Dietz | R460C | 190182.0014/ | 553 |
| | Syndrome 2 | | rs104893811/ | |
| | | | VCV000012514 | |
| P37173 | Loeys-Dietz | R460H | 190182.0015/ | 554 |
| | Syndrome 2 | | rs104893816/ | |
| | | | VCV000012515 | |
| P37173 | Loeys-Dietz | R537H | —/ | 555 |
| | Syndrome 2 | | rs1057524810/ | |
| | | | VCV000393141 | |

[0315] An exemplary amino acid sequence of a TGF-BR2 polypeptide (also referred to herein as TGF-β3R2 polypeptide) comprises or consists of the amino acid sequence of SEQ ID NO: 500. In some embodiments, the dominant negative isoform of TGF-BR2 comprises a truncation after the glutamine at position 194 of SEQ ID NO: 500. In some embodiments, the dominant negative isoform of TGF-BR2 comprises a truncation after the tyrosine at position 187 of SEQ ID NO: 500. In some embodiments, the dominant negative isoform of TGF-BR2 comprises a cysteine at position 537 of SEQ ID NO: 500. In some embodiments, the dominant negative isoform of TGF-BR2 comprises a histidine at position 528 of SEQ ID NO: 500. In some embodiments, the dominant negative isoform of TGF-BR2 comprises a cysteine at position 528 of SEQ ID NO: 500. In some embodiments, the dominant negative isoform of TGF-BR2 comprises a cysteine at position 460 of SEQ ID NO: 500. In some embodiments, the dominant negative isoform of TGF-BR2 comprises a histidine at position 460 of SEQ ID NO. 500. In some embodiments, the dominant negative isoform of TGF-BR2 comprises a histidine at position 537 of SEQ ID NO: 500.

[0316] In some embodiments, the dominant negative isoform of TGF-BR2 comprises a polypeptide having at least 90%, at least 91%, at least 92%, at least 93%, at least 94%, at least 95%, at least 96%, at least 97%, at least 98%, at least 99%, or 100% sequence identity to the amino acid sequence of SEQ ID NO: 500, wherein the polypeptide comprises: a truncation after the glutamine at the amino acid position corresponding to position 194 of SEQ ID NO: 500, a truncation after the tyrosine at the amino acid position corresponding to position 187 of SEQ ID NO: 500, a cysteine at the amino acid position corresponding to position 537 of SEQ ID NO: 500, a histidine at the amino acid position corresponding to position 528 of SEQ ID NO: 500, a cysteine at the amino acid position corresponding to position 528 of SEQ ID NO: 500, a cysteine at the amino acid position corresponding to position 460 of SEQ ID NO: 500, a histidine at the amino acid position corresponding to position 460 of SEQ ID NO: 500, or a histidine at the amino acid position corresponding to position 537 of SEQ ID NO: 500.

### Signal Inverters

[0317] The chimeric proteins of the signal inverter modality of the disclosure can be generated by combining one or more of an extracellular domain, a transmembrane domain, and an intracellular domain, disclosed herein, wherein the extracellular domain is capable of engaging a negative signal that prevents activation of an immune response, and wherein the intracellular domain comprises at least a portion of the intracellular domain of a stimulatory polypeptide that is associated with a positive signal that promotes activation of an immune response or activates an immune cell.

[0318] The following set of non-limiting parameters could allow one of skill in the art to identify and combine one or more of an extracellular domain, a transmembrane domain, and an intracellular domain disclosed herein, and thereby generate exemplary chimeric proteins of the signal inverter modality of the disclosure.

### 1) Orientation

[0319] In some embodiments, the chimeric protein comprises an N-terminal to C-terminal orientation relative to the cell surface, wherein the chimeric proteins comprise an N-terminal to C-terminal orientation throughout the protein, i.e., each of the extracellular domain, the transmembrane domain, and the intracellular domain comprise the same N-terminal to C-terminal orientation. Type I receptors comprise an extracellular N-terminus and an intracellular C-terminus, and they are anchored to the plasma membrane with a stop-transfer anchor sequence. Type II receptors comprise an intracellular N-terminus and an extracellular C-terminus. Type III receptors comprise the same orientation as type I receptors of an extracellular N-terminus and an intracellular C-terminus. However, unlike type I receptors, type III receptors are anchored with a signal-anchor sequence.

[0320] In some embodiments, the chimeric protein comprises an extracellular domain, or a portion thereof, of a type I receptor in combination with an intracellular domain, or a portion thereof, of a type I receptor. In some embodiments, the chimeric protein comprises an extracellular domain, or a portion thereof, of a type I receptor in combination with an intracellular domain, or a portion thereof, of a type III receptor. In some embodiments, the chimeric protein comprises an extracellular domain, or a portion thereof, of a type I receptor in combination with an intracellular domain, or a portion thereof, of a protein that is not associated with the plasma membrane. In some embodiments, the chimeric protein comprises an extracellular domain, or a portion thereof, of a type II receptor in combination with an intracellular domain, or a portion thereof, of a type II receptor. In some embodiments, the chimeric protein comprises an extracellular domain, or a portion thereof, of a type I receptor in combination with a transmembrane domain, or a portion thereof, of a type I receptor, and an intracellular domain, or a portion thereof, of a type II receptor.

[0321] In some embodiments, the transmembrane domain and the intracellular domain are connected by a linker. In some embodiments, the transmembrane domain and the extracellular domain are connected by a linker. In some embodiments, the transmembrane domain is connected to the extracellular domain by a first linker and is connected to the intracellular domain by a second linker. Suitable linkers include any linker disclosed herein.

### 2) Transmembrane Domains

[0322] In some embodiments, the transmembrane domain of the chimeric protein comprises or consists of a transmembrane domain, or a portion thereof, of an inhibitory polypeptide disclosed herein. In some embodiments, the transmembrane domain of the chimeric protein comprises or consists of a transmembrane domain, or a portion thereof, of a stimulatory polypeptide disclosed herein. In some embodiments, the transmembrane domain of the chimeric protein is not a transmembrane domain of an inhibitory polypeptide when the intracellular domain of the chimeric protein is derived from a stimulatory polypeptide having a transmembrane domain associated with a positive signal that promotes activation of an immune response or activates an immune cell. An association, or lack of association, of the transmembrane domain of exemplary stimulatory polypeptides with a positive signal that promotes activation of an immune response or activates an immune cell is described in Table 2.

### 3) Isoforms

[0323] In some embodiments, the chimeric protein comprises an intracellular domain comprising the intracellular domain, or a portion thereof, of isoform 1 (e.g., as identified by a canonical UNIPROT ID) of a stimulatory polypeptide listed in Table 2. In some embodiments, the intracellular domain comprises the intracellular domain, or a portion thereof, of one or more isoforms of a stimulatory polypeptide listed in Table 2.

4) scFv-based Extracellular Domains

[0324] In some embodiments, the extracellular domain of a chimeric protein comprises an antigen-binding domain that specifically binds to the negative signal that prevents activation of an immune response. In embodiments, the antigen-binding domain comprises an scFv, a Fab, or a VHH. The scFv may be anchored to the plasma membrane of an immune cell by being connected to the transmembrane domain. In some embodiments, the scFv is multivalent. In some embodiments, the scFv and the transmembrane domain are connected by a linker. In embodiments, where the extracellular domain of the chimeric protein comprises an antigen-binding domain, the transmembrane domain is preferably a transmembrane domain of a stimulatory polypeptide, or a portion thereof, disclosed herein.

### 5) Combination of Extracellular Domain and Intracellular Domain

[0325] The combination of the extracellular domain and intracellular domain in a chimeric protein may be selected based on the similarities of their structural properties (e.g., capability of oligomerization) and/or functional properties (e.g., compatibility to induce a signal transduction pathway). The compatibility of the combination of the extracellular domain and intracellular domain can be determined, for example, by screening for the associated positive signal in a cell, for example, NK cell. In some embodiments, the chimeric protein comprises an extracellular domain, or a portion thereof, of an inhibitory polypeptide that is capable of forming a dimer in combination with an intracellular domain, or a portion thereof, of a stimulatory polypeptide that is capable of forming a dimer. In some embodiments, the chimeric protein comprises an extracellular domain, or a portion thereof, of an inhibitory polypeptide that is capable of forming a trimer in combination with an intracellular domain, or a portion thereof, of a stimulatory polypeptide that is capable of forming a trimer. In some embodiments, the chimeric protein comprises an extracellular domain, or a portion thereof, of an inhibitory polypeptide that is capable of inducing signal transduction in an immune cell (e.g., NK cell), in combination with an intracellular domain, or a portion thereof, of a stimulatory polypeptide. In some embodiments, the chimeric protein does not comprise an extracellular domain, or a portion thereof, of an inhibitory polypeptide that is not capable of forming an oligomer in combination with an intracellular domain, or a portion thereof, of a stimulatory polypeptide that is capable of forming an oligomer.

[0326] In one aspect, the disclosure is directed to chimeric proteins comprising an extracellular domain, a transmembrane domain, and an intracellular domain, wherein the extracellular domain engages TGF-β, and wherein the intracellular domain comprises at least a portion of the intracellular domain of a stimulatory polypeptide that is associated with a positive signal that activates an immune cell. In some embodiments, the extracellular domain comprises at least a portion of the extracellular domain of a TGF-β receptor polypeptide.

[0327] Tables 6 and 7 show exemplary chimeric protein constructs that are capable of binding a TGF-B signal, and domains thereof.

[0328] In some embodiments, the chimeric protein comprises an extracellular domain capable of binding TGF-s, a transmembrane domain, and an intracellular domain, wherein the intracellular domain comprises the intracellular domain, or a portion thereof, of a stimulatory polypeptide that is associated with a positive signal that activates an immune cell. In some embodiments, the stimulatory polypeptide is CD226, natural cytotoxicity triggering receptor 1, CD160, hematopoietic cell signal transducer, TYRO protein tyrosine kinase-binding protein, MyD88, granulocyte colony-stimulating factor receptor, macrophage colony-stimulating factor 1 receptor, erythropoietin receptor, inducible T-cell costimulator, T-cell-specific surface glycoprotein CD28, transmembrane and immunoglobulin domain-containing protein 2, tumor necrosis factor receptor superfamily member 9, tumor necrosis factor receptor superfamily member 25, tumor necrosis factor receptor superfamily member 4, low affinity immunoglobulin gamma Fc region receptor III-A, low affinity immunoglobulin gamma Fc region receptor II-c, high affinity immunoglobulin epsilon receptor subunit gamma, T-cell surface antigen CD2, natural killer cell receptor 2B4, SLAM family member 7, T-cell surface glycoprotein CD3 epsilon chain, T-cell surface glycoprotein CD3 gamma chain, T-cell surface glycoprotein CD3 zeta chain, carcinoembryonic antigen-related cell adhesion molecule 3, macrophage mannose receptor 1, intercellular adhesion molecule 1, intercellular adhesion molecule 2, intercellular adhesion molecule 3, interleukin-1 receptor-associated kinase 1, interleukin-1 receptor-associated kinase-like 2, interleukin-1 receptor-associated kinase 4, B-cell receptor CD22, sialic acid-binding Ig-like lectin 14, sialic acid-binding Ig-like lectin 15, hepatitis A virus cellular receptor 1, toll-like receptor 3, toll-like receptor 4, toll-like receptor 9, tyrosine-protein kinase SYK, proto-oncogene tyrosine-protein kinase Src, tyrosine-protein kinase ZAP-70, killer cell lectin-like receptor subfamily F member 2, killer cell lectin-like receptor subfamily F member 1, NKG2-D type II integral membrane protein, C-type lectin domain family 7 member A, tumor necrosis factor ligand superfamily member 9, tumor necrosis factor ligand superfamily member 14, or tumor necrosis factor ligand superfamily member 13B.

[0329] In some embodiments, the chimeric protein comprises an extracellular domain of a TGF-βR1 polypeptide, a transmembrane domain, and an intracellular domain, wherein the intracellular domain comprises the intracellular domain, or a portion thereof, of a stimulatory polypeptide that is associated with a positive signal that activates an immune cell. In some embodiments, the stimulatory polypeptide is CD226, natural cytotoxicity triggering receptor 1, CD160, hematopoietic cell signal transducer, TYRO protein tyrosine kinase-binding protein, myeloid differentiation primary response protein MyD88, granulocyte colony-stimulating factor receptor, macrophage colony-stimulating factor 1 receptor, erythropoietin receptor, inducible T-cell costimulator, T-cell-specific surface glycoprotein CD28, transmembrane and immunoglobulin domain-containing protein 2, tumor necrosis factor receptor superfamily member 9, tumor necrosis factor receptor superfamily member 25, tumor necrosis factor receptor superfamily member 4, low affinity immunoglobulin gamma Fc region receptor III-A, low affinity immunoglobulin gamma Fc region receptor II-c, high affinity immunoglobulin epsilon receptor subunit gamma, T-cell surface antigen CD2, natural killer cell receptor 2B4, SLAM family member 7, T-cell surface glycoprotein CD3 epsilon chain, T-cell surface glycoprotein CD3 gamma chain, T-cell surface glycoprotein CD3 zeta chain, carcinoembryonic antigen-related cell adhesion molecule 3, macrophage mannose receptor 1, intercellular adhesion molecule 1, intercellular adhesion molecule 2, intercellular adhesion molecule 3, interleukin-1 receptor-associated kinase 1, interleukin-1 receptor-associated kinase-like 2, interleukin-1 receptor-associated kinase 4, B-cell receptor CD22, sialic acid-binding Ig-like lectin 14, sialic acid-binding Ig-like lectin 15, hepatitis A virus cellular receptor 1, toll-like receptor 3, toll-like receptor 4, toll-like receptor 9, tyrosine-protein kinase SYK, proto-oncogene tyrosine-protein kinase Src, tyrosine-protein kinase ZAP-70, killer cell lectin-like receptor subfamily F member 2, killer cell lectin-like receptor subfamily F member 1, NKG2-D type II integral membrane protein, C-type lectin domain family 7 member A, tumor necrosis factor ligand superfamily member 9, tumor necrosis factor ligand superfamily member 14, or tumor necrosis factor ligand superfamily member 13B.

[0330] In some embodiments, the chimeric protein comprises an extracellular domain of a TGF-p R2 polypeptide, a transmembrane domain, and an intracellular domain, wherein the intracellular domain comprises the intracellular domain, or a portion thereof, of a stimulatory polypeptide that is associated with a positive signal that activates an immune cell. In some embodiments, the stimulatory polypeptide is CD226, natural cytotoxicity triggering receptor 1, CD160, hematopoietic cell signal transducer, TYRO protein tyrosine kinase-binding protein, myeloid differentiation primary response protein MyD88, granulocyte colony-stimulating factor receptor, macrophage colony-stimulating factor 1 receptor, erythropoietin receptor, inducible T-cell costimulator, T-cell-specific surface glycoprotein CD28, transmembrane and immunoglobulin domain-containing protein 2, tumor necrosis factor receptor superfamily member 9, tumor necrosis factor receptor superfamily member 25, tumor necrosis factor receptor superfamily member 4, low affinity immunoglobulin gamma Fc region receptor III-A, I low affinity immunoglobulin gamma Fc region receptor II-c, high affinity immunoglobulin epsilon receptor subunit gamma, T-cell surface antigen CD2, natural killer cell receptor 2B4, SLAM family member 7, T-cell surface glycoprotein CD3 epsilon chain, T-cell surface glycoprotein CD3 gamma chain, T-cell surface glycoprotein CD3 zeta chain, carcinoembryonic antigen-related cell adhesion molecule 3, macrophage mannose receptor 1, intercellular adhesion molecule 1, intercellular adhesion molecule 2, intercellular adhesion molecule 3, interleukin-1 receptor-associated kinase 1, interleukin-1 receptor-associated kinase-like 2, interleukin-1 receptor-associated kinase 4, B-cell receptor CD22, sialic acid-binding Ig-like lectin 14, sialic acid-binding Ig-like lectin 15, hepatitis A virus cellular receptor 1, toll-like receptor 3, toll-like receptor 4, toll-like receptor 9, tyrosine-protein kinase SYK, proto-oncogene tyrosine-protein kinase Src, tyrosine-protein kinase ZAP-70, killer cell lectin-like receptor subfamily F member 2, killer cell lectin-like receptor subfamily F member 1, NKG2-D type II integral membrane protein, C-type lectin domain family 7 member A, tumor necrosis factor ligand superfamily member 9, tumor necrosis factor ligand superfamily member 14, or tumor necrosis factor ligand superfamily member 13B.

[0331] In some embodiments, the chimeric protein comprises an extracellular domain comprising an antigen-binding domain that specifically binds TGF-β, a transmembrane domain, and an intracellular domain, wherein the intracellular domain comprises the intracellular domain, or a portion thereof, of a stimulatory polypeptide that is associated with a positive signal that activates an immune cell. In some embodiments, the antigen-binding domain comprises an scFv. In some embodiments, the stimulatory polypeptide is CD226, natural cytotoxicity triggering receptor 1, CD160, hematopoietic cell signal transducer, TYRO protein tyrosine kinase-binding protein, I myeloid differentiation primary response protein MyD88, granulocyte colony-stimulating factor receptor, macrophage colony-stimulating factor 1 receptor, erythropoietin receptor, inducible T-cell costimulator, T-cell-specific surface glycoprotein CD28, transmembrane and immunoglobulin domain-containing protein 2, tumor necrosis factor receptor superfamily member 9, tumor necrosis factor receptor superfamily member 25, or tumor necrosis factor receptor superfamily member 4.

[0332] In some embodiments, the chimeric protein comprises an extracellular domain of a TGF-βR1 polypeptide and a TGF-βR2 polypeptide, a transmembrane domain, and an intracellular domain, wherein the intracellular domain comprises the intracellular domain, or a portion thereof, of a stimulatory polypeptide that is associated with a positive signal that activates an immune cell. In some embodiments, the chimeric protein comprises the intracellular domain, or a portion thereof, of two or more different stimulatory polypeptides. In some embodiments, the two or more different stimulatory polypeptides comprise: tyrosine-protein kinase Lck and t-cell surface glycoprotein CD3 zeta chain, T-cell surface glycoprotein CD3 zeta chain and Tyrosine-protein kinase ZAP-70, tyrosine-protein kinase ZAP-70 and linker for activation of T-cells family member 1, tyrosine-protein kinase ZAP-70 and lymphocyte cytosolic protein 2, myeloid differentiation primary response protein MyD88 and interleukin-1 receptor-associated kinase 4, interleukin-1 receptor-associated kinase 4 and interleukin-1 receptor-associated kinase 1, interleukin-1 receptor-associated kinase 4 and interleukin-1 receptor-associated kinase-like 2, interleukin-1 receptor-associated kinase 1 and TNF receptor-associated factor 6, interleukin-1 receptor-associated kinase-like 2 and TNF receptor-associated factor 6. I interleukin-3 receptor subunit alpha and cytokine receptor common subunit beta, interleukin-2 receptor subunit beta and cytokine receptor common subunit gamma, interleukin-21 receptor and cytokine receptor common subunit gamma, interleukin-7 receptor subunit alpha and cytokine receptor common subunit gamma, interleukin-7 receptor subunit alpha and cytokine receptor-like factor 2, interleukin-12 receptor subunit beta-1 and interleukin-12 receptor subunit beta-2, or interleukin-18 receptor 1 and interleukin-8 receptor accessory protein.

TABLE 6
Exemplary Chimeric Protein Constructs that Bind TGF-B and Domains Thereof

| | ECD | | ICD | | | |
|---|---|---|---|---|---|---|
| | UNIPROT | | UNIPROT | ICD | | |
| ECD^{a} | ID | ICD^{b} | ID | Isoform(s) | Class | Group |
| TGF-BR1 | P36897 | CD226 antigen | Q15762 | 1 | Ig family | NK activating |
| | | | | | receptor | receptors |
| TGF-BR1 | P36897 | Natural cytotoxicity | O76036 | 1 | Ig family | NK activating |
| | | triggering receptor 1 | | | receptor | receptors |
| TGF-BR1 | P36897 | CD160 antigen | O95971 | 3 | Ig family | NK activating |
| | | | | | receptor | receptors |
| TGF-BR1 | P36897 | Hematopoietic cell | Q9UBK5 | 1 | Adaptor | Signaling |
| | | signal transducer | | | | adaptors |
| TGF-BR1 | P36897 | TYRO protein | O43914 | 1 | Adaptor | Signaling |
| | | tyrosine kinase- | | | | adaptors |
| | | binding protein | | | | |
| TGF-BR1 | P36897 | Myeloid | Q99836 | 1, 2, 4, 6, 8 | Adaptor | Signaling |
| | | differentiation | | | | adaptors |
| | | primary response | | | | |
| | | protein MyD88 | | | | |
| TGF-BR1 | P36897 | Granulocyte colony- | Q99062 | 1, 2, 3, 4 | Cytokine | Homodimerizing |
| | | stimulating factor | | | receptor | cytokines and |
| | | receptor | | | | growth factors |
| TGF-BR1 | P36897 | Macrophage colony- | P07333 | 1 | Cytokine | Homodimerizing |
| | | stimulating factor 1 | | | receptor | cytokines and |
| | | receptor | | | | growth factors |
| TGF-BR1 | P36897 | Erythropoietin | P19235 | 1 | Growth | Homodimerizing |
| | | receptor | | | factor | cytokines and |
| | | | | | receptor | growth factors |
| TGF-BR1 | P36897 | Inducible T-cell | Q9Y6W8 | 1 | Ig family | TCR |
| | | costimulator | | | receptor | costimulatory |
| | | | | | | receptors |
| TGF-BR1 | P36897 | T-cell-specific | P10747 | 1 | Ig family | TCR |
| | | surface glycoprotein | | | receptor | costimulatory |
| | | CD28 | | | | receptors |
| TGF-BR1 | P36897 | Transmembrane and | Q96BF3 | 1, 2 | Ig family | TCR |
| | | immunoglobulin | | | receptor | costimulatory |
| | | domain-containing | | | | receptors |
| | | protein 2 | | | | |
| TGF-BR1 | P36897 | Tumor necrosis | Q07011 | 1 | TNF | Tumor Necrosis |
| | | factor receptor | | | family | Family receptors |
| | | superfamily | | | receptor | |
| | | member 9 | | | | |
| TGF-BR1 | P36897 | Tumor necrosis | Q93038 | 1 | TNF | Tumor Necrosis |
| | | factor receptor | | | family | Family receptors |
| | | superfamily | | | receptor | |
| | | member 25 | | | | |
| TGF-BR1 | P36897 | Tumor necrosis | P43489 | 1 | TNF | Tumor Necrosis |
| | | factor receptor | | | family | Family receptors |
| | | superfamily | | | receptor | |
| | | member 4 | | | | |
| TGF-BR1 | P36897 | Low affinity | P08637 | 1 | Antibody | Antibody |
| | | immunoglobulin | | | receptor | receptors |
| | | gamma Fc region | | | | |
| | | receptor III-A | | | | |
| TGF-BR1 | P36897 | Low affinity | P31995 | 1, 2, 3, 4, 5 | Antibody | Antibody |
| | | immunoglobulin | | | receptor | receptors |
| | | gamma Fc region | | | | |
| | | receptor II-c | | | | |
| TGF-BR1 | P36897 | High affinity | P30273 | 1 | Antibody | Antibody |
| | | immunoglobulin | | | receptor | receptors |
| | | epsilon receptor | | | | |
| | | subunit gamma | | | | |
| TGF-BR1 | P36897 | T-cell surface | P06729 | 1 | CD2 | CD2 family |
| | | antigen CD2 | | | family | receptors |
| | | | | | receptor | |
| TGF-BR1 | P36897 | Natural killer cell | Q9BZW8 | 1, 3 | CD2 | CD2 family |
| | | receptor 2B4 | | | family | receptors |
| | | | | | receptor | |
| TGF-BR1 | P36897 | SLAM family | Q9NQ25 | 1, 3, 5 | CD2 | CD2 family |
| | | member 7 | | | family | receptors |
| | | | | | receptor | |
| TGF-BR1 | P36897 | T-cell surface | P07766 | 1 | CD3 | CD3 family |
| | | glycoprotein CD3 | | | Chain | receptors |
| | | epsilon chain | | | | |
| TGF-BR1 | P36897 | T-cell surface | P09693 | 1 | CD3 | CD3 family |
| | | glycoprotein CD3 | | | Chain | receptors |
| | | gamma chain | | | | |
| TGF-BR1 | P36897 | T-cell surface | P20963 | 1 | CD3 | CD3 family |
| | | glycoprotein CD3 | | | Chain | receptors |
| | | zeta chain | | | | |
| TGF-BR1 | P36897 | Carcinoembryonic | P40198 | 1, 2, 3 | CEACAM | Unique |
| | | antigen-related cell | | | family | |
| | | adhesion molecule 3 | | | | |
| TGF-BR1 | P36897 | Macrophage | P22897 | 1 | C-type | Unique |
| | | mannose receptor 1 | | | lectin | |
| | | | | | family | |
| | | | | | receptor | |
| TGF-BR1 | P36897 | Intercellular | P05362 | 1 | Ig family | Intercellular |
| | | adhesion molecule 1 | | | receptor | adhesion receptors |
| TGF-BR1 | P36897 | Intercellular | P13598 | 1 | Ig family | Intercellular |
| | | adhesion molecule 2 | | | receptor | adhesion receptors |
| TGF-BR1 | P36897 | Intercellular | P32942 | 1 | Ig family | Intercellular |
| | | adhesion molecule 3 | | | receptor | adhesion receptors |
| TGF-BR1 | P36897 | Interleukin-1 | P51617 | 1 | Serine/ | Innate immune |
| | | receptor-associated | | | threonine- | signaling |
| | | kinase 1 | | | protein | serine/threonine |
| | | | | | kinase | protein kinase |
| TGF-BR1 | P36897 | Interleukin-1 | O43187 | 1 | Serine/ | Innate immune |
| | | receptor-associated | | | threonine- | signaling |
| | | kinase-like 2 | | | protein | serine/threonine |
| | | | | | kinase | protein kinase |
| TGF-BR1 | P36897 | Interleukin-1 | Q9NWZ3 | 1, 2 | Serine/ | Innate immune |
| | | receptor-associated | | | threonine- | signaling |
| | | kinase 4 | | | protein | serine/threonine |
| | | | | | kinase | protein kinase |
| TGF-BR1 | P36897 | B-cell receptor | P20273 | 1, 4 | Siglec | Siglec family |
| | | CD22 | | | lectin | activating |
| | | | | | family | receptors |
| | | | | | receptor | |
| TGF-BR1 | P36897 | Sialic acid-binding | Q08ET2 | 1 | Siglec | Siglec family |
| | | Ig-like lectin 14 | | | lectin | activating |
| | | | | | family | receptors |
| | | | | | receptor | |
| TGF-BR1 | P36897 | Sialic acid-binding | Q6ZMC9 | 1 | Siglec | Siglec family |
| | | Ig-like lectin 15 | | | lectin | activating |
| | | | | | family | receptors |
| | | | | | receptor | |
| TGF-BR1 | P36897 | Hepatitis A virus | Q96D42 | 1 | TIM | Unique |
| | | cellular receptor 1 | | | receptor | |
| | | | | | family | |
| TGF-BR1 | P36897 | Toll-like receptor 3 | O15455 | 1 | TLR | Toll-like family |
| | | | | | family | receptors |
| TGF-BR1 | P36897 | Toll-like receptor 4 | O00206 | 1 | TLR | Toll-like family |
| | | | | | family | receptors |
| TGF-BR1 | P36897 | Toll-like receptor 9 | Q9NR96 | 1 | TLR | Toll-like family |
| | | | | | family | receptors |
| TGF-BR1 | P36897 | Tyrosine-protein | P43405 | 1, 2 | Tyrosine- | Immune signaling |
| | | kinase SYK | | | protein | tyrosine protein |
| | | | | | kinase | kinase |
| TGF-BR1 | P36897 | Proto-oncogene | P12931 | 1, 2 | Tyrosine- | Immune signaling |
| | | tyrosine-protein | | | protein | tyrosine protein |
| | | kinase Src | | | kinase | kinase |
| TGF-BR1 | P36897 | Tyrosine-protein | P43403 | 1, 2, 3 | Tyrosine- | Immune signaling |
| | | kinase ZAP-70 | | | protein | tyrosine protein |
| | | | | | kinase | kinase |
| TGF-BR1 | P36897 | Killer cell lectin-like | D3W0D1 | 1 | C-type | C-type lectin |
| | | receptor subfamily F | | | lectin | family receptor |
| | | member 2 | | | family | |
| | | | | | receptor | |
| TGF-BR1 | P36897 | Killer cell lectin-like | Q9NZS2 | 1 | C-type | C-type lectin |
| | | receptor subfamily F | | | lectin | family receptor |
| | | member 1 | | | family | |
| | | | | | receptor | |
| TGF-BR1 | P36897 | NKG2-D type II | P26718 | 1 | C-type | C-type lectin |
| | | integral membrane | | | lectin | family receptor |
| | | protein | | | family | |
| | | | | | receptor | |
| TGF-BR1 | P36897 | C-type lectin | Q9BXN2 | 1 | C-type | C-type lectin |
| | | domain family 7 | | | lectin | family receptor |
| | | member A | | | family | |
| | | | | | receptor | |
| TGF-BR1 | P36897 | Tumor necrosis | P41273 | 1 | TNF | TNF Family |
| | | factor ligand | | | Family | Ligand |
| | | superfamily | | | Ligand | |
| | | member 9 | | | | |
| TGF-BR1 | P36897 | Tumor necrosis | 043557 | 1 | TNF | TNF Family |
| | | factor ligand | | | Family | Ligand |
| | | superfamily | | | Ligand | |
| | | member 14 | | | | |
| TGF-BR1 | P36897 | Tumor necrosis | Q9Y275 | 1, 2, 3 | TNF | TNF Family |
| | | factor ligand | | | Family | Ligand |
| | | superfamily | | | Ligand | |
| | | member 13B | | | | |
| TGF-BR2 | P37173 | CD226 antigen | Q15762 | 1 | Ig family | NK activating |
| | | | | | receptor | receptors |
| TGF-BR2 | P37173 | Natural cytotoxicity | O76036 | 1 | Ig family | NK activating |
| | | triggering receptor 1 | | | receptor | receptors |
| TGF-BR2 | P37173 | CD160 antigen | O95971 | 3 | Ig family | NK activating |
| | | | | | receptor | receptors |
| TGF-BR2 | P37173 | Hematopoietic cell | Q9UBK5 | 1 | Adaptor | Signaling |
| | | signal transducer | | | | adaptors |
| TGF-BR2 | P37173 | TYRO protein | O43914 | 1 | Adaptor | Signaling |
| | | tyrosine kinase- | | | | adaptors |
| | | binding protein | | | | |
| TGF-BR2 | P37173 | Myeloid | Q99836 | 1, 2, 4, 6, 8 | Adaptor | Signaling |
| | | differentiation | | | | adaptors |
| | | primary response | | | | |
| | | protein MyD88 | | | | |
| TGF-BR2 | P37173 | Granulocyte colony- | Q99062 | 1, 2, 3, 4 | Cytokine | Homodimerizing |
| | | stimulating factor | | | receptor | cytokines and |
| | | receptor | | | | growth factors |
| TGF-BR2 | P37173 | Macrophage colony- | P07333 | 1 | Cytokine | Homodimerizing |
| | | stimulating factor 1 | | | receptor | cytokines and |
| | | receptor | | | | growth factors |
| TGF-BR2 | P37173 | Erythropoietin | P19235 | 1 | Growth | Homodimerizing |
| | | receptor | | | factor | cytokines and |
| | | | | | receptor | growth factors |
| TGF-BR2 | P37173 | Inducible T-cell | Q9Y6W8 | 1 | Ig family | TCR |
| | | costimulator | | | receptor | costimulatory |
| | | | | | | receptors |
| TGF-BR2 | P37173 | T-cell-specific | P10747 | 1 | Ig family | TCR |
| | | surface glycoprotein | | | receptor | costimulatory |
| | | CD28 | | | | receptors |
| TGF-BR2 | P37173 | Transmembrane and | Q96BF3 | 1, 2 | Ig family | TCR |
| | | immunoglobulin | | | receptor | costimulatory |
| | | domain-containing | | | | receptors |
| | | protein 2 | | | | |
| TGF-BR2 | P37173 | Tumor necrosis | Q07011 | 1 | TNF | Tumor Necrosis |
| | | factor receptor | | | family | Family receptors |
| | | superfamily | | | receptor | |
| | | member 9 | | | | |
| TGF-BR2 | P37173 | Tumor necrosis | Q93038 | 1 | TNF | Tumor Necrosis |
| | | factor receptor | | | family | Family receptors |
| | | superfamily | | | receptor | |
| | | member 25 | | | | |
| TGF-BR2 | P37173 | Tumor necrosis | P43489 | 1 | TNF | Tumor Necrosis |
| | | factor receptor | | | family | Family receptors |
| | | superfamily | | | receptor | |
| | | member 4 | | | | |
| TGF-BR2 | P37173 | Low affinity | P08637 | 1 | Antibody | Antibody |
| | | immunoglobulin | | | receptor | receptors |
| | | gamma Fc region | | | | |
| | | receptor III-A | | | | |
| TGF-BR2 | P37173 | Low affinity | P31995 | 1, 2, 3, 4, 5 | Antibody | Antibody |
| | | immunoglobulin | | | receptor | receptors |
| | | gamma Fc region | | | | |
| | | receptor II-c | | | | |
| TGF-BR2 | P37173 | High affinity | P30273 | 1 | Antibody | Antibody |
| | | immunoglobulin | | | receptor | receptors |
| | | epsilon receptor | | | | |
| | | subunit gamma | | | | |
| TGF-BR2 | P37173 | T-cell surface | P06729 | 1 | CD2 | CD2 family |
| | | antigen CD2 | | | family | receptors |
| | | | | | receptor | |
| TGF-BR2 | P37173 | Natural killer cell | Q9BZW8 | 1, 3 | CD2 | CD2 family |
| | | receptor 2B4 | | | family | receptors |
| | | | | | receptor | |
| TGF-BR2 | P37173 | SLAM family | Q9NQ25 | 1, 3, 5 | CD2 | CD2 family |
| | | member 7 | | | family | receptors |
| | | | | | receptor | |
| TGF-BR2 | P37173 | T-cell surface | P07766 | 1 | CD3 | CD3 family |
| | | glycoprotein CD3 | | | Chain | receptors |
| | | epsilon chain | | | | |
| TGF-BR2 | P37173 | T-cell surface | P09693 | 1 | CD3 | CD3 family |
| | | glycoprotein CD3 | | | Chain | receptors |
| | | gamma chain | | | | |
| TGF-BR2 | P37173 | T-cell surface | P20963 | 1 | CD3 | CD3 family |
| | | glycoprotein CD3 | | | Chain | receptors |
| | | zeta chain | | | | |
| TGF-BR2 | P37173 | Carcinoembryonic | P40198 | 1, 2, 3 | CEACAM | Unique |
| | | antigen-related cell | | | family | |
| | | adhesion molecule 3 | | | | |
| TGF-BR2 | P37173 | Macrophage | P22897 | 1 | C-type | Unique |
| | | mannose receptor 1 | | | lectin | |
| | | | | | family | |
| | | | | | receptor | |
| TGF-BR2 | P37173 | Intercellular | P05362 | 1 | Ig family | Intercellular |
| | | adhesion molecule 1 | | | receptor | adhesion receptors |
| TGF-BR2 | P37173 | Intercellular | P13598 | 1 | Ig family | Intercellular |
| | | adhesion molecule 2 | | | receptor | adhesion receptors |
| TGF-BR2 | P37173 | Intercellular | P32942 | 1 | Ig family | Intercellular |
| | | adhesion molecule 3 | | | receptor | adhesion receptors |
| TGF-BR2 | P37173 | Interleukin-1 | P51617 | 1 | Serine/ | Innate immune |
| | | receptor-associated | | | threonine- | signaling |
| | | kinase 1 | | | protein | serine/threonine |
| | | | | | kinase | protein kinase |
| TGF-BR2 | P37173 | Interleukin-1 | O43187 | 1 | Serine/ | Innate immune |
| | | receptor-associated | | | threonine- | signaling |
| | | kinase-like 2 | | | protein | serine/threonine |
| | | | | | kinase | protein kinase |
| TGF-BR2 | P37173 | Interleukin-1 | Q9NWZ3 | 1, 2 | Serine/ | Innate immune |
| | | receptor-associated | | | threonine- | signaling |
| | | kinase 4 | | | protein | serine/threonine |
| | | | | | kinase | protein kinase |
| TGF-BR2 | P37173 | B-cell receptor | P20273 | 1, 4 | Siglec | Siglec family |
| | | CD22 | | | lectin | activating |
| | | | | | family | receptors |
| | | | | | receptor | |
| TGF-BR2 | P37173 | Sialic acid-binding | Q08ET2 | 1 | Siglec | Siglec family |
| | | Ig-like lectin 14 | | | lectin | activating |
| | | | | | family | receptors |
| | | | | | receptor | |
| TGF-BR2 | P37173 | Sialic acid-binding | Q6ZMC9 | 1 | Siglec | Siglec family |
| | | Ig-like lectin 15 | | | lectin | activating |
| | | | | | family | receptors |
| | | | | | receptor | |
| TGF-BR2 | P37173 | Hepatitis A virus | Q96D42 | 1 | TIM | Unique |
| | | cellular receptor 1 | | | receptor | |
| | | | | | family | |
| TGF-BR2 | P37173 | Toll-like receptor 3 | O15455 | 1 | TLR | Toll-like family |
| | | | | | family | receptors |
| TGF-BR2 | P37173 | Toll-like receptor 4 | O00206 | 1 | TLR | Toll-like family |
| | | | | | family | receptors |
| TGF-BR2 | P37173 | Toll-like receptor 9 | Q9NR96 | 1 | TLR | Toll-like family |
| | | | | | family | receptors |
| TGF-BR2 | P37173 | Tyrosine-protein | P43405 | 1, 2 | Tyrosine- | Immune signaling |
| | | kinase SYK | | | protein | tyrosine protein |
| | | | | | kinase | kinase |
| TGF-BR2 | P37173 | Proto-oncogene | P12931 | 1, 2 | Tyrosine- | Immune signaling |
| | | tyrosine-protein | | | protein | tyrosine protein |
| | | kinase Src | | | kinase | kinase |
| TGF-BR2 | P37173 | Tyrosine-protein | P43403 | 1, 2, 3 | Tyrosine- | Immune signaling |
| | | kinase ZAP-70 | | | protein | tyrosine protein |
| | | | | | kinase | kinase |
| TGF-BR2 | P37173 | Killer cell lectin-like | D3W0D1 | 1 | C-type | C-type lectin |
| | | receptor subfamily F | | | lectin | family receptor |
| | | member 2 | | | family | |
| | | | | | receptor | |
| TGF-BR2 | P37173 | Killer cell lectin-like | Q9NZS2 | 1 | C-type | C-type lectin |
| | | receptor subfamily F | | | lectin | family receptor |
| | | member 1 | | | family | |
| | | | | | receptor | |
| TGF-BR2 | P37173 | NKG2-D type II | P26718 | 1 | C-type | C-type lectin |
| | | integral membrane | | | lectin | family receptor |
| | | protein | | | family | |
| | | | | | receptor | |
| TGF-BR2 | P37173 | C-type lectin | Q9BXN2 | 1 | C-type | C-type lectin |
| | | domain family 7 | | | lectin | family receptor |
| | | member A | | | family | |
| | | | | | receptor | |
| TGF-BR2 | P37173 | Tumor necrosis | P41273 | 1 | TNF | TNF Family |
| | | factor ligand | | | Family | Ligand |
| | | superfamily | | | Ligand | |
| | | member 9 | | | | |
| TGF-BR2 | P37173 | Tumor necrosis | O43557 | 1 | TNF | TNF Family |
| | | factor ligand | | | Family | Ligand |
| | | superfamily | | | Ligand | |
| | | member 14 | | | | |
| TGF-BR2 | P37173 | Tumor necrosis | Q9Y275 | 1, 2, 3 | TNF | TNF Family |
| | | factor ligand | | | Family | Ligand |
| | | superfamily | | | Ligand | |
| | | member 13B | | | | |
| ScFv | | CD226 antigen | Q15762 | 1 | Ig family | NK activating |
| specific | | | | | receptor | receptors |
| for | | | | | | |
| TGF-B1 | | | | | | |
| ScFv | | Natural | O76036 | 1 | Ig family | NK activating |
| specific | | cytotoxicity | | | receptor | receptors |
| for | | triggering | | | | |
| TGF-B1 | | receptor 1 | | | | |
| ScFv | | CD160 antigen | O95971 | 3 | Ig family | NK activating |
| specific | | | | | receptor | receptors |
| for | | | | | | |
| TGF-B1 | | | | | | |
| ScFv | | Hematopoietic cell | Q9UBK5 | 1 | Adaptor | Signaling |
| specific | | signal transducer | | | | adaptors |
| for | | | | | | |
| TGF-B1 | | | | | | |
| ScFv | | TYRO protein | O43914 | 1 | Adaptor | Signaling |
| specific | | tyrosine kinase- | | | adaptors | |
| for | | binding protein | | | | |
| TGF-B1 | | | | | | |
| ScFv | | Myeloid | Q99836 | 1, 2, 4, 6, 8 | Adaptor | Signaling |
| specific | | differentiation | | | | adaptors |
| for | | primary response | | | | |
| TGF-B1 | | protein MyD88 | | | | |
| ScFv | | Granulocyte colony- | Q99062 | 1, 2, 3, 4 | Cytokine | Homodimerizing |
| specific | | stimulating factor | | | receptor | cytokines and |
| for | | receptor | | | | growth factors |
| TGF-B1 | | | | | | |
| ScFv | | Macrophage colony- | P07333 | 1 | Cytokine | Homodimerizing |
| specific | | stimulating factor 1 | | | receptor | cytokines and |
| for | | receptor | | | | growth factors |
| TGF-B1 | | | | | | |
| ScFv | | Erythropoietin | P19235 | 1 | Growth | Homodimerizing |
| specific | | receptor | | | factor | cytokines and |
| for | | | | | receptor | growth factors |
| TGF-B1 | | | | | | |
| ScFv | | Inducible T-cell | Q9Y6W8 | 1 | Ig family | TCR |
| specific | | costimulator | | | receptor | costimulatory |
| for | | | | | | receptors |
| TGF-B1 | | | | | | |
| ScFv | | T-cell-specific | P10747 | 1 | Ig family | TCR |
| specific | | surface glycoprotein | | | receptor | costimulatory |
| for | | CD28 | | | | receptors |
| TGF-B1 | | | | | | |
| ScFv | | Transmembrane and | Q96BF3 | 1, 2 | Ig family | TCR |
| specific | | immunoglobulin | | | receptor | costimulatory |
| for | | domain-containing | | | | receptors |
| TGF-B1 | | protein 2 | | | | |
| ScFv | | Tumor necrosis | Q07011 | 1 | TNF | Tumor Necrosis |
| specific | | factor receptor | | | family | Family receptors |
| for | | superfamily | | | receptor | |
| TGF-B1 | | member 9 | | | | |
| ScFv | | Tumor necrosis | Q93038 | 1 | TNF | Tumor Necrosis |
| specific | | factor receptor | | | family | Family receptors |
| for | | superfamily | | | receptor | |
| TGF-B1 | | member 25 | | | | |
| ScFv | | Tumor necrosis | P43489 | 1 | TNF | Tumor Necrosis |
| specific | | factor receptor | | | family | Family receptors |
| for | | superfamily | | | receptor | |
| TGF-B1 | | member 4 | | | | |

^{a}The extracellular domain (ECD) refers to the ECD of an inhibitory polypeptide, or a portion thereof (e.g., TGF-BR1, or TGF-BR2), or an scFv (e.g., scFv specific for TGF-B).
^{b}The intracellular domain (ICD) refers to the ICD of a stimulatory polypeptide, or a portion thereof (e.g., CD226 antigen).

TABLE 7
Exemplary Chimeric Protein Constructs that Bind TGF-B and Domains Thereof

| | | | UNIPROT | | UNIPROT | |
|---|---|---|---|---|---|---|
| | | | ID- | ICD^{b}- | ID- | |
| | ECD | ICD^{b}- | stimulatory | stimulatory | stimulatory | |
| | UNIPROT | stimulatory | polypeptide | polypeptide | polypeptide | |
| ECD^{a} | ID | polypeptide 1 | 1 | 2 | 2 | Class |
| TGF-BR1 | P36897 | Tyrosine-protein | P06239 | T-cell | P20963 | TCR signaling |
| and | and | kinase Lck | | surface | | pathway |
| TGF-BR2 | P37173 | | | glycoprotein | | |
| | | | | CD3 zeta | | |
| | | | | chain | | |
| TGF-BR1 | P36897 | T-cell surface | P20963 | Tyrosine- | P43403 | TCR signaling |
| and | and | glycoprotein CD3 | | protein | | pathway |
| TGF-BR2 | P37173 | zeta chain | | kinase ZAP- | | |
| | | | | 70 | | |
| TGF-BR1 | P36897 | Tyrosine-protein | P43403 | Linker for | O43561 | TCR signaling |
| and | and | kinase ZAP-70 | | activation of | | pathway |
| TGF-BR2 | P37173 | | | T-cells | | |
| | | | | family | | |
| | | | | member 1 | | |
| TGF-BR1 | P36897 | Tyrosine-protein | P43403 | Lymphocyte | Q13094 | TCR signaling |
| and | and | kinase ZAP-70 | | cytosolic | | pathway |
| TGF-BR2 | P37173 | | | protein 2 | | |
| TGF-BR1 | P36897 | Myeloid | Q99836 | Interleukin- | Q9NWZ3 | MyD88 |
| and | and | differentiation | | 1 receptor- | | signaling |
| TGF-BR2 | P37173 | primary response | | associated | | pathway |
| | | protein MyD88 | | kinase 4 | | |
| TGF-BR1 | P36897 | Interleukin-1 | Q9NWZ3 | Interleukin- | P51617 | MyD88 |
| and | and | receptor- | | 1 receptor- | | signaling |
| TGF-BR2 | P37173 | associated kinase | | associated | | pathway |
| | | 4 | | kinase 1 | | |
| TGF-BR1 | P36897 | Interleukin-1 | Q9NWZ3 | Interleukin- | O43187 | MyD88 |
| and | and | receptor- | | 1 receptor- | | signaling |
| TGF-BR2 | P37173 | associated kinase | | associated | | pathway |
| | | 4 | | kinase-like | | |
| | | | | 2 | | |
| TGF-BR1 | P36897 | Interleukin-1 | P51617 | TNF | Q9Y4K3 | MyD88 |
| and | and | receptor- | | receptor- | | signaling |
| TGF-BR2 | P37173 | associated kinase | | associated | | pathway |
| | | 1 | | factor 6 | | |
| TGF-BR1 | P36897 | Interleukin-1 | O43187 | TNF | Q9Y4K3 | MyD88 |
| and TGF- | and | receptor- | | receptor- | | signaling |
| BR2 | P37173 | associated kinase- | | associated | | pathway |
| | | like 2 | | factor 6 | | |
| TGF-BR1 | P36897 | Interleukin-3 | P26951 | Cytokine | P32927 | Heterodimeric |
| and | and | receptor subunit | | receptor | | cytokine |
| TGF-BR2 | P37173 | alpha | | common | | signaling |
| | | | | subunit beta | | |
| TGF-BR1 | P36897 | Interleukin-2 | P14784 | Cytokine | P31785 | Heterodimeric |
| and | and | receptor subunit | | receptor | | cytokine |
| TGF-BR2 | P37173 | beta | | common | | signaling |
| | | | | subunit | | |
| | | | | gamma | | |
| TGF-BR1 | P36897 | Interleukin-21 | Q9HBE5 | Cytokine | P31785 | Heterodimeric |
| and | and | receptor | | receptor | | cytokine |
| TGF-BR2 | P37173 | | | common | | signaling |
| | | | | subunit | | |
| | | | | gamma | | |
| TGF-BR1 | P36897 | Interleukin-7 | P16871 | Cytokine | P31785 | Heterodimeric |
| and | and | receptor subunit | | receptor | | cytokine |
| TGF-BR2 | P37173 | alpha | | common | | signaling |
| | | | | subunit | | |
| | | | | gamma | | |
| TGF-BR1 | P36897 | Interleukin-7 | P16871 | Cytokine | Q9HC73 | Heterodimeric |
| and | and | receptor subunit | | receptor- | | cytokine |
| TGF-BR2 | P37173 | alpha | | like factor 2 | | signaling |
| TGF-BR1 | P36897 | Interleukin-12 | P42701 | Interleukin- | Q99665 | Heterodimeric |
| and | and | receptor subunit | | 12 receptor | | cytokine |
| TGF-BR2 | P37173 | beta-1 | | subunit | | signaling |
| | | | | beta-2 | | |
| TGF-BR1 | P36897 | Interleukin-18 | Q13478 | Interleukin- | O95256 | Heterodimeric |
| and | and | receptor 1 | | 18 receptor | | cytokine |
| TGF-BR2 | P37173 | | | accessory | | signaling |
| | | | | protein | | |

^{a}The extracellular domain (ECD) refers to the ECD of one or more inhibitory polypeptides, or a portion thereof (e.g., TGF-BR1 and TGF-BR2), or an ScFv (e.g., ScFv specific for TGF-B).
^{b}The intracellular domain (ICD) refers to the ICD of a stimulatory polypeptide, or a portion thereof (e.g., IL-18R).

[0333] In some embodiments, the chimeric protein comprises an extracellular domain of a TGF-BR2 polypeptide, a transmembrane domain, and an intracellular domain, wherein the intracellular domain comprises the intracellular domain, or a portion thereof, of a IL-21R polypeptide. In some embodiments, the chimeric protein comprises an extracellular domain of a TGF-BR2 polypeptide (e.g., SEQ ID NO: 39), a transmembrane domain of a TGF-BR2 polypeptide, and an intracellular domain a IL-21R polypeptide, and optionally a signal peptide of a TGF-BR2 polypeptide (e.g., SEQ ID NO: 496). In some embodiments, the chimeric protein comprises an extracellular domain of a TGF-BR2 polypeptide (e.g., SEQ ID NO: 39), a transmembrane domain of a TGF-BR2 polypeptide (e.g., SEQ ID NO: 257), and an intracellular domain of a IL-21R polypeptide (e.g., SEQ ID NO: 95). In some embodiments, the chimeric protein comprises an amino acid sequence that is at least 80%, at least 85%, at least 90%, at least 91%, at least 92%, at least 93%, at least 94%, at least 95%, at least 96%, at least 97%, at least 98%, at least 99% or at least 100% identical to the amino acid sequence of SEQ ID NOs: 680 or 681.

[0334] In some embodiments, the chimeric protein comprises an extracellular domain of a TGF-BR2 polypeptide, a transmembrane domain, and an intracellular domain, wherein the intracellular domain comprises the intracellular domain, or a portion thereof, of a IL-2RG polypeptide. In some embodiments, the chimeric protein comprises an extracellular domain of a TGF-BR2 polypeptide (e.g., SEQ ID NO: 39), a transmembrane domain of a IL-2RG polypeptide, and an intracellular domain a IL-2RG polypeptide, and optionally a signal peptide of a CD8α polypeptide (e.g., SEQ ID NO: 676). In some embodiments, the chimeric protein comprises an extracellular domain of a TGF-BR2 polypeptide (e.g., SEQ ID NO: 39), a transmembrane domain of a IL-2RG polypeptide (e.g., SEQ ID NO: 289), and an intracellular domain of a IL-2RG polypeptide (e.g., SEQ ID NO: 73). In some embodiments, the chimeric protein comprises an amino acid sequence that is at least 80%, at least 85%, at least 90%, at least 91%, at least 92%, at least 93%, at least 94%, at least 95%, at least 96%, at least 97%, at least 98%, at least 99% or at least 100% identical to the amino acid sequence of SEQ ID NOs: 682 or 683.

[0335] In some embodiments, the chimeric protein comprises an extracellular domain of a TGF-BR1 polypeptide, a transmembrane domain, and an intracellular domain, wherein the intracellular domain comprises the intracellular domain, or a portion thereof, of a IL-2RG polypeptide. In some embodiments, the chimeric protein comprises an extracellular domain of a TGF-BR1 polypeptide (e.g., SEQ ID NO: 38), a transmembrane domain of a IL-2RG polypeptide, and an intracellular domain a IL-2RG polypeptide, and optionally a signal peptide of a CD8α polypeptide (e.g., SEQ ID NO: 676). In some embodiments, the chimeric protein comprises an extracellular domain of a TGF-BR1 polypeptide (e.g., SEQ ID NO: 38), a transmembrane domain of a IL-2RG polypeptide (e.g., SEQ ID NO: 289), and an intracellular domain of a IL-2RG polypeptide (e.g., SEQ ID NO: 73). In some embodiments, the chimeric protein comprises an amino acid sequence that is at least 80%, at least 85%, at least 90%, at least 91%, at least 92%, at least 93%, at least 94%, at least 95%, at least 96%, at least 97%, at least 98%, at least 99% or at least 100% identical to the amino acid sequence of SEQ ID NOs: 684 or 685.

[0336] In some embodiments, the chimeric protein comprises an extracellular domain of a TGF-BR1 polypeptide, a transmembrane domain, and an intracellular domain, wherein the intracellular domain comprises the intracellular domain, or a portion thereof, of a IL-21R polypeptide. In some embodiments, the chimeric protein comprises an extracellular domain of a TGF-BR1 polypeptide (e.g., SEQ ID NO: 38), a transmembrane domain of a IL-21R polypeptide, and an intracellular domain a IL-21R polypeptide, and optionally a signal peptide of a TGFBR1 polypeptide (e.g., SEQ ID NO: 495). In some embodiments, the chimeric protein comprises an extracellular domain of a TGF-BR1 polypeptide (e.g., SEQ ID NO: 38), a transmembrane domain of a IL-21R polypeptide (e.g., SEQ ID NO: 256), and an intracellular domain of a IL-21R polypeptide (e.g., SEQ ID NO: 95). In some embodiments, the chimeric protein comprises an amino acid sequence that is at least 80%, at least 85%, at least 90%, at least 91%, at least 92%, at least 93%, at least 94%, at least 95%, at least 96%, at least 97%, at least 98%, at least 99% or at least 100% identical to the amino acid sequence of SEQ ID NOs: 686 or 687.

[0337] In some embodiments, a cell provided herein (e.g., an immune cell, e.g., an NK cell) comprises (e.g., is engineered to express) a first chimeric protein and a second chimeric protein, wherein:
[0338] (a) the first chimeric protein comprises an extracellular domain of a TGF-BR2 polypeptide, a transmembrane domain (e.g., a transmembrane domain of a TGF-BR2 polypeptide), and an intracellular domain of a IL-21R polypeptide (e.g., comprises an amino acid sequence that is at least 80%, at least 85%, at least 90%, at least 95%, at least 96%, at least 97%, at least 98%, at least 99% or at least 100% identical to the amino acid sequence of SEQ ID NOs: 680 or 681), and the second polypeptide comprises an extracellular domain of a TGF-BR2 polypeptide, a transmembrane domain (e.g., a transmembrane domain of a IL-2RG polypeptide), and an intracellular domain of a IL-2RG polypeptide (e.g., comprises an amino acid sequence that is at least 80%, at least 85%, at least 90%, at least 95%, at least 96%, at least 97%, at least 98%, at least 99/c or at least 100% identical to the amino acid sequence of SEQ ID NOs: 682 or 683);
[0339] (b) the first chimeric protein comprises an extracellular domain of a TGF-BR2 polypeptide, a transmembrane domain (e.g., a transmembrane domain of a TGF-BR2 polypeptide), and an intracellular domain of a IL-21R polypeptide (e.g., comprises an amino acid sequence that is at least 80%, at least 85%, at least 90%, at least 95%, at least 96%, at least 97%, at least 98%, at least 99% or at least 100% identical to the amino acid sequence of SEQ ID NOs: 680 or 681), and the second polypeptide comprises an extracellular domain of a TGF-BR1 polypeptide, a transmembrane domain (e.g., a transmembrane domain of a IL-2RG polypeptide), and an intracellular domain of a IL-2RG polypeptide (e.g., comprises an amino acid sequence that is at least 80%, at least 85%, at least 90%, at least 95%, at least 96%, at least 97%, at least 98%, at least 99% or at least 100/o identical to the amino acid sequence of SEQ ID NOs: 684 or 685);
[0340] (c) the first chimeric protein comprises an extracellular domain of a TGF-BR2 polypeptide, a transmembrane domain (e.g., a transmembrane domain of a IL-2RG polypeptide), and an intracellular domain of a IL-2RG polypeptide (e.g., comprises an amino acid sequence that is at least 80%, at least 85%, at least 90%, at least 95%, at least 96%, at least 97%, at least 98%, at least 99% or at least 100% identical to the amino acid sequence of SEQ ID NOs: 682 or 683), and the second polypeptide comprises an extracellular domain of a TGF-BR1 polypeptide, a transmembrane domain (e.g., a transmembrane domain of a IL-21R polypeptide), and an intracellular domain a IL-21R polypeptide (e.g., comprises an amino acid sequence that is at least 80%, at least 85%, at least 90%, at least 95%, at least 96%, at least 97%, at least 98%, at least 99% or at least 100% identical to the amino acid sequence of SEQ ID NOs: 686 or 687); or
[0341] (d) the first chimeric protein comprises an extracellular domain of a TGF-BR1 polypeptide, a transmembrane domain (e.g., a transmembrane domain of a EL-21R polypeptide), and an intracellular domain a IL-21R polypeptide (e.g., comprises an amino acid sequence that is at least 80%, at least 85%, at least 90%, at least 95%, at least 96%, at least 97%, at least 98%, at least 99% or at least 100% identical to the amino acid sequence of SEQ ID NOs: 686 or 687), and the second chimeric protein comprises an extracellular domain of a TGF-BR1 polypeptide, a transmembrane domain (e.g., a transmembrane domain of a IL-2RG polypeptide), and an intracellular domain of a IL-2RG polypeptide (e.g., comprises an amino acid sequence that is at least 80%, at least 85%, at least 90%, at least 95%, at least 96%, at least 97%, at least 98%, at least 99% or at least 100% identical to the amino acid sequence of SEQ ID NOs: 684 or 685). Table 8 indicates exemplary chimeric protein constructs that are capable of engaging an IL-10 signal, and domains thereof.

TABLE 8
Exemplary Chimeric Protein Constructs that Bind IL-10 and Domains Thereof

| | ECD | | ICD | | | |
|---|---|---|---|---|---|---|
| | UNIPROT | | UNIPROT | ICD | | |
| ECD^{a} | ID | ICD^{b} | ID | isoform(s) | Class | Group |
| IL-10RA | Q13651 | CD226 antigen | Q15762 | 1 | Ig family | NK activating |
| | | | | | receptor | receptors |
| IL-10RA | Q13651 | Natural cytotoxicity | O76036 | 1 | | Ig family |
| | | triggering receptor 1 | | | | receptor |
| IL-10RA | Q13651 | CD160 antigen | O95971 | 3 | Ig family | NK activating |
| | | | | | receptor | receptors |
| IL-10RA | Q13651 | Hematopoietic cell | Q9UBK5 | 1 | Adaptor | Signaling |
| | | signal transducer | | | | adaptors |
| IL-10RA | Q13651 | TYRO protein tyrosine | O43914 | 1 | Adaptor | Signaling |
| | | kinase-binding protein | | | | adaptors |
| IL-10RA | Q13651 | Myeloid differentiation | Q99836 | 1, 2, 4, 6, 8 | Adaptor | Signaling |
| | | primary response | | | | adaptors |
| | | protein MyD88 | | | | |
| IL-10RA | Q13651 | Granulocyte colony- | Q99062 | 1, 2, 3, 4 | Cytokine | Homodimerizing |
| | | stimulating factor | | | receptor | cytokines and |
| | | receptor | | | | growth factors |
| IL-10RA | Q13651 | Macrophage colony- | P07333 | 1 | Cytokine | Homodimerizing |
| | | stimulating factor 1 | | | receptor | cytokines and |
| | | receptor | | | | growth factors |
| IL-10RA | Q13651 | Erythropoietin receptor | P19235 | 1 | Growth | Homodimerizing |
| | | | | | factor | cytokines and |
| | | | | | receptor | growth factors |
| IL-10RA | Q13651 | Inducible T-cell | Q9Y6W8 | 1 | Ig family | TCR |
| | | costimulator | | | receptor | costimulatory |
| | | | | | | receptors |
| IL-10RA | Q13651 | T-cell-specific surface | P10747 | 1 | Ig family | TCR |
| | | glycoprotein CD28 | | | receptor | costimulatory |
| | | | | | | receptors |
| IL-10RA | Q13651 | Transmembmne and | Q96BF3 | 1, 2 | Ig family | TCR |
| | | immunoglobulin | | | receptor | costimulatory |
| | | domain-containing | | | | receptors |
| | | protein 2 | | | | |
| IL-10RA | Q13651 | Tumor necrosis factor | Q07011 | 1 | TNF | Tumor Necrosis |
| | | receptor superfamily | | | family | Family receptors |
| | | member 9 | | | receptor | |
| IL-10RA | Q13651 | Tumor necrosis factor | Q93038 | 1 | TNF | Tumor Necrosis |
| | | receptor superfamily | | | family | Family receptors |
| | | member 25 | | | receptor | |
| IL-10RA | Q13651 | Tumor necrosis factor | P43489 | 1 | TNF | Tumor Necrosis |
| | | receptor superfamily | | | family | Family receptors |
| | | member 4 | | | receptor | |
| IL-10RA | Q13651 | Low affinity | P08637 | 1 | Antibody | Antibody |
| | | immunoglobulin | | | receptor | receptors |
| | | gamma Fc region | | | | |
| | | receptor III-A | | | | |
| IL-10RA | Q13651 | Low affinity | P31995 | 1, 2, 3, 4, 5 | Antibody | Antibody |
| | | immunoglobulin | | | receptor | receptors |
| | | gamma Fc region | | | | |
| | | receptor II-c | | | | |
| IL-10RA | Q13651 | High affinity | P30273 | 1 | Antibody | Antibody |
| | | immunoglobulin | | | receptor | receptors |
| | | epsilon receptor | | | | |
| | | subunit gamma | | | | |
| IL-10RA | Q13651 | T-cell surface antigen | P06729 | 1 | CD2 | CD2 family |
| | | CD2 | | | family | receptors |
| | | | | | receptor | |
| IL-10RA | Q13651 | Natural killer cell | Q9BZW8 | 1, 3 | CD2 | CD2 family |
| | | receptor 2B4 | | | family | receptors |
| | | | | | receptor | |
| IL-10RA | Q13651 | SLAM family member | Q9NQ25 | 1, 3, 5 | CD2 | CD2 family |
| | | 7 | | | family | receptors |
| | | | | | receptor | |

^{a}The extracellular domain (ECD) refers to the ECD of an inhibitory polypeptide, or a portion thereof (e.g., IL-10RA), or an ScFv (e.g., ScFv specific for IL-10).
^{b}The intracellular domain (ICD) refers to the ICD of a stimulatory polypeptide, or a portion thereof (e.g., CD226 antigen).

[0342] In some embodiments, the chimeric protein comprises an extracellular domain capable of binding IL-10, a transmembrane domain, and an intracellular domain, wherein the intracellular domain comprises the intracellular domain, or a portion thereof, of a stimulatory polypeptide that is associated with a positive signal that activates an immune cell. In some embodiments, the stimulatory polypeptide is CD226, natural cytotoxicity triggering receptor 1, CD160, hematopoietic cell signal transducer, TYRO protein tyrosine kinase-binding protein, myeloid differentiation primary response protein MyD88, granulocyte colony-stimulating factor receptor, macrophage colony-stimulating factor 1 receptor, erythropoietin receptor, inducible T-cell costimulator, T-cell-specific surface glycoprotein CD28, transmembrane and immunoglobulin domain-containing protein 2, tumor necrosis factor receptor superfamily member 9, tumor necrosis factor receptor superfamily member 25, tumor necrosis factor receptor superfamily member 4, low affinity immunoglobulin gamma Fc region receptor III-A, low affinity immunoglobulin gamma Fc region receptor II-c, high affinity immunoglobulin epsilon receptor subunit gamma, T-cell surface antigen CD2, natural killer cell receptor 2B4, or SLAM family member 7.

[0343] In some embodiments, the chimeric protein comprises an extracellular domain of an IL-10RA polypeptide, a transmembrane domain, and an intracellular domain, wherein the intracellular domain comprises the intracellular domain, or a portion thereof, of a stimulatory polypeptide that is associated with a positive signal that activates an immune cell. In some embodiments, the stimulatory polypeptide is CD226, natural cytotoxicity triggering receptor 1, CD160, hematopoietic cell signal transducer, TYRO protein tyrosine kinase-binding protein, myeloid differentiation primary response protein MyD88, granulocyte colony-stimulating factor receptor, macrophage colony-stimulating factor 1 receptor, erythropoietin receptor, inducible T-cell costimulator, T-cell-specific surface glycoprotein CD28, transmembrane and immunoglobulin domain-containing protein 2, tumor necrosis factor receptor superfamily member 9, tumor necrosis factor receptor superfamily member 25, tumor necrosis factor receptor superfamily member 4, low affinity immunoglobulin gamma Fc region receptor III-A, low affinity immunoglobulin gamma Fc region receptor II-c, high affinity immunoglobulin epsilon receptor subunit gamma, T-cell surface antigen CD2, natural killer cell receptor 2B4, or SLAM family member 7.

[0344] Table 9 indicates exemplary chimeric protein constructs that are capable of engaging an HLA signal, and domains thereof. In some embodiments, the extracellular domain of the chimeric protein constructs of Table 9 comprises the extracellular domain of an inhibitory KIR provided herein (e.g., e.g., KIR2DL1, KIR2DL2, KIR2DL3, KIR2DL5A, KIR2DL55, or KIR3DL1).

TABLE 9
Exemplary Chimeric Protein Constructs that Bind HLA and Domains Thereof

| Extracellular | Intracellular | ICD UNIPROT | ICD | | |
|---|---|---|---|---|---|
| domain (ECD)^{a} | domain (ICD)^{b} | ID | isoform(s) | Class | Group |
| Inhibitory KIR | CD226 antigen | Q15762 | 1 | Ig family | NK activating |
| | | | | receptor | receptors |
| Inhibitory KIR | Natural cytotoxicity | O76036 | 1 | Ig family | NK activating |
| | triggering receptor 1 | | | receptor | receptors |
| Inhibitory KIR | CD160 antigen | O95971 | 3 | Ig family | NK activating |
| | | | | receptor | receptors |
| Inhibitory KIR | Hematopoietic cell | Q9UBK5 | 1 | Adaptor | Signaling |
| | signal transducer | | | | adaptors |
| Inhibitory KIR | TYRO protein | O43914 | 1 | Adaptor | Signaling |
| | tyrosine kinase- | | | | adaptors |
| | binding protein | | | | |
| Inhibitory KIR | Myeloid | Q99836 | 1, 2, 4, 6, 8 | Adaptor | Signaling |
| | differentiation | | | | adaptors |
| | primary response | | | | |
| | protein MyD88 | | | | |
| Inhibitory KIR | Granulocyte colony- | Q99062 | 1, 2, 3, 4 | Cytokine | Homodimerizing |
| | stimulating factor | | | receptor | cytokines and |
| | receptor | | | | growth factors |
| Inhibitory KIR | Macrophage colony- | P07333 | 1 | Cytokine | Homodimerizing |
| | stimulating factor 1 | | | receptor | cytokines and |
| | receptor | | | | growth factors |
| Inhibitory KIR | Erythropoietin | P19235 | 1 | Growth | Homodimerizing |
| | receptor | | | factor | cytokines and |
| | | | | receptor | growth factors |
| Inhibitory KIR | Inducible T-cell | Q9Y6W8 | 1 | Ig family | TCR |
| | costimulator | | | receptor | costimulatory |
| | | | | | receptors |
| Inhibitory KIR | T-cell-specific | P10747 | 1 | Ig family | TCR |
| | surface glycoprotein | | | receptor | costimulatory |
| | CD28 | | | | receptors |
| Inhibitory KIR | Transmembrane and | Q96BF3 | 1, 2 | Ig family | TCR |
| | immunoglobulin | | | receptor | costimulatory |
| | domain-containing | | | | receptors |
| | protein 2 | | | | |
| Inhibitory KIR | Tumor necrosis | Q07011 | 1 | TNF | Tumor Necrosis |
| | factor receptor | | | family | Family receptors |
| | superfamily member | | | receptor | |
| | 9 | | | | |
| Inhibitory KIR | Tumor necrosis | Q93038 | 1 | TNF | Tumor Necrosis |
| | factor receptor | | | family | Family receptors |
| | superfamily member | | | receptor | |
| | 25 | | | | |
| Inhibitory KIR | Tumor necrosis | P43489 | 1 | TNF | Tumor Necrosis |
| | factor receptor | | | family | Family receptors |
| | superfamily member | | | receptor | |
| | 4 | | | | |
| Inhibitory KIR | Killer cell | Q99706 | 1 | Ig family | KIR activating |
| | immunoglobulin-like | | | receptor | receptor |
| | receptor 2DL4 | | | | |
| Inhibitory KIR | Killer cell | Q14954 | 1 | Ig family | KIR activating |
| | immunoglobulin-like | | | receptor | receptor |
| | receptor 2DS1 | | | | |
| Inhibitory KIR | Killer cell | P43631 | 1 | Ig family | KIR activating |
| | immunoglobulin-like | | | receptor | receptor |
| | receptor 2DS2 | | | | |
| Inhibitory KIR | Killer cell | Q14952 | 1 | Ig family | KIR activating |
| | immunoglobulin-like | | | receptor | receptor |
| | receptor 2DS3 | | | | |
| Inhibitory KIR | Killer cell | P43632 | 1 | Ig family | KIR activating |
| | immunoglobulin-like | | | receptor | receptor |
| | receptor 2DS4 | | | | |
| Inhibitory KIR | Killer cell | Q14953 | 1 | Ig family | KIR activating |
| | immunoglobulin-like | | | receptor | receptor |
| | receptor 2DS5 | | | | |
| Inhibitory KIR | Killer cell | Q14943 | 1 | Ig family | KIR activating |
| | immunoglobulin-like | | | receptor | receptor |
| | receptor 3DS1 | | | | |

^{a}The extracellular domain (ECD) refers to the ECD of an inhibitory polypeptide, or a portion thereof (e.g., inhibitory KIR), or an ScEv (e.g., ScEv specific for HLA).
^{b}The intracellular domain (ICD) refers to the ICD of a stimulatory polypeptide, or a portion thereof (e.g., CD226 antigen).

[0345] In some embodiments, the chimeric protein comprises an extracellular domain capable of binding HLA, a transmembrane domain, and an intracellular domain, wherein the intracellular domain comprises the intracellular domain, or a portion thereof, of a stimulatory polypeptide that is associated with a positive signal that activates an immune cell. In some embodiments, the stimulatory polypeptide is CD226, natural cytotoxicity triggering receptor 1, CD160, hematopoietic cell signal transducer, TYRO protein tyrosine kinase-binding protein, myeloid differentiation primary response protein MyD88, granulocyte colony-stimulating factor receptor, I macrophage colony-stimulating factor 1 receptor, erythropoietin receptor, inducible T-cell costimulator, T-cell-specific surface glycoprotein CD28, transmembrane and immunoglobulin domain-containing protein 2, tumor necrosis factor receptor superfamily member 9, tumor necrosis factor receptor superfamily member 25, tumor necrosis factor receptor superfamily member 4, killer cell immunoglobulin-like receptor 2DL4, killer cell immunoglobulin-like receptor 2DS1, killer cell immunoglobulin-like receptor 2DS2, killer cell immunoglobulin-like receptor 2DS3, killer cell immunoglobulin-like receptor 2DS4, killer cell immunoglobulin-like receptor 2DS5, killer cell immunoglobulin-like receptor 3DS1, or paired immunoglobulin-like type 2 receptor beta (PILRB).

[0346] In some embodiments, the chimeric protein comprises an extracellular domain of an inhibitory KIR polypeptide, a transmembrane domain, and an intracellular domain, wherein the intracellular domain comprises the intracellular domain, or a portion thereof, of a stimulatory polypeptide that is associated with a positive signal that activates an immune cell. In some embodiments, the stimulatory polypeptide is CD226, natural cytotoxicity triggering receptor 1, CD160, hematopoietic cell signal transducer, TYRO protein tyrosine kinase-binding protein, myeloid differentiation primary response protein MyD88, granulocyte colony-stimulating factor receptor, macrophage colony-stimulating factor 1 receptor, erythropoietin receptor, inducible T-cell costimulator, T-cell-specific surface glycoprotein CD28, transmembrane and immunoglobulin domain-containing protein 2, tumor necrosis factor receptor superfamily member 9, tumor necrosis factor receptor superfamily member 25, tumor necrosis factor receptor superfamily member 4, killer cell immunoglobulin-like receptor 2DL4, killer cell immunoglobulin-like receptor 2DS1, killer cell immunoglobulin-like receptor 2DS2, killer cell immunoglobulin-like receptor 2DS3, killer cell immunoglobulin-like receptor 2DS4, killer cell immunoglobulin-like receptor 2DS5, or killer cell immunoglobulin-like receptor 3DS1, or paired immunoglobulin-like type 2 receptor beta (PILRB).

[0347] In some embodiments, the chimeric protein comprises an extracellular domain of LILRB2 (e.g., SEQ ID NO: 28), a transmembrane domain, and an intracellular domain, wherein the intracellular domain comprises the intracellular domain, or a portion thereof, of a stimulatory polypeptide that is associated with a positive signal that activates an immune cell. In some embodiments, the stimulatory polypeptide is paired immunoglobulin-like type 2 receptor beta (PILRB). In some embodiments, the chimeric protein comprises an extracellular domain of LILRB2 (e.g., SEQ ID NO: 28), a transmembrane domain of PILRB (e.g., SEQ ID NO: 534), and an intracellular domain of PILRB (e.g., SEQ ID NO: 535).

[0348] Table 10 indicates exemplary chimeric protein constructs that are capable of engaging a CD155 and/or CD112 signal, and domains thereof.

TABLE 10
Exemplary Chimeric Protein Constructs that Bind CD155 and/or CD112 and
Domains Thereof

| | ECD | | ICD | ICD | | |
|---|---|---|---|---|---|---|
| | UNIPROT | | UNIPROT | iso- | | |
| ECD^{a} | ID | ICD^{b} | ID | form(s) | Class | Group |
| TIGIT | Q495A1 | CD226 antigen | Q15762 | 1 | Ig family | NK activating |
| | | | | | receptor | receptors |
| TIGIT | Q495A1 | Natural cytotoxicity | O76036 | 1 | Ig family | NK activating |
| | | triggering receptor 1 | | | receptor | receptors |
| TIGIT | Q495A1 | CD160 antigen | O95971 | 3 | Ig family | NK activating |
| | | | | | receptor | receptors |
| TIGIT | Q495A1 | Hematopoietic cell signal | Q9UBK5 | 1 | Adaptor | Signaling adaptors |
| | | transducer | | | | |
| TIGIT | Q495A1 | TYRO protein tyrosine | O43914 | 1 | Adaptor | Signaling adaptors |
| | | kinase-binding protein | | | | |
| TIGIT | Q495A1 | Myeloid differentiation | Q99836 | 1, 2, 4, | Adaptor | Signaling adaptors |
| | | primary response protein | | 6, 8 | | |
| | | MyD88 | | | | |
| TIGIT | Q495A1 | Granulocyte colony- | Q99062 | 1, 2, 3, | Cytokine | Homodimerizing |
| | | stimulating factor | | 4 | receptor | cytokines and |
| | | receptor | | | | growth factors |
| TIGIT | Q495A1 | Macrophage colony- | P07333 | 1 | Cytokine | Homodimerizing |
| | | stimulating factor 1 | | | receptor | cytokines and |
| | | receptor | | | | growth factors |
| TIGIT | Q495A1 | Erythropoietin receptor | P19235 | 1 | Growth | Homodimerizing |
| | | | | | factor | cytokines and |
| | | | | | receptor | growth factors |
| TIGIT | Q495A1 | Inducible T-cell | Q9Y6W8 | 1 | Ig family | TCR |
| | | costimulator | | | receptor | costimulatory |
| | | | | | | receptors |
| TIGIT | Q495A1 | T-cell-specific surface | P10747 | 1 | Ig family | TCR |
| | | glycoprotein CD28 | | | receptor | costimulatory |
| | | | | | | receptors |
| TIGIT | Q495A1 | Transmembrane and | Q96BF3 | 1, 2 | Ig family | TCR |
| | | immunoglobulin domain- | | | receptor | costimulatory |
| | | containing protein 2 | | | | receptors |
| TIGIT | Q495A1 | Tumor necrosis factor | Q07011 | 1 | TNF | Tumor Necrosis |
| | | receptor superfamily | | | family | Family receptors |
| | | member 9 | | | receptor | |
| TIGIT | Q495A1 | Tumor necrosis factor | Q93038 | 1 | TNF | Tumor Necrosis |
| | | receptor superfamily | | | family | Family receptors |
| | | member 25 | | | receptor | |
| TIGIT | Q495A1 | Tumor necrosis factor | P43489 | 1 | TNF | Tumor Necrosis |
| | | receptor superfamily | | | family | Family receptors |
| | | member 4 | | | receptor | |
| | | domain (ECD) | | | | |

^{a}The extracellular domain (ECD) refers to the ECD of an inhibitory polypeptide, or a portion thereof (e.g., TIGIT), or an scFv (e.g., scFv specific for CD112 and/or CD155).
^{b}The intracellular domain (ICD) refers to the ICD of a stimulatory polypeptide, or a portion thereof (e.g., CD226 antigen).

[0349] In some embodiments, the chimeric protein comprises an extracellular domain capable of binding CD155 and/or CD112, a transmembrane domain, and an intracellular domain, wherein the intracellular domain comprises the intracellular domain, or a portion thereof, of a stimulatory polypeptide that is associated with a positive signal that activates an immune cell. In some embodiments, the stimulatory polypeptide is CD226, natural cytotoxicity triggering receptor 1, CD160, hematopoietic cell signal transducer, TYRO protein tyrosine kinase-binding protein. In some embodiments, the stimulatory polypeptide is myeloid differentiation primary response protein MyD88. In some embodiments, the stimulatory polypeptide is granulocyte colony-stimulating factor receptor. In some embodiments, the stimulatory polypeptide is macrophage colony-stimulating factor 1 receptor. In some embodiments, the stimulatory polypeptide is erythropoietin receptor. In some embodiments, the stimulatory polypeptide is inducible T-cell costimulator. In some embodiments, the stimulatory polypeptide is T-cell-specific surface glycoprotein CD28. In some embodiments, the stimulatory polypeptide is Transmembrane and immunoglobulin domain-containing protein 2. In some embodiments, the stimulatory polypeptide is tumor necrosis factor receptor superfamily member 9. In some embodiments, the stimulatory polypeptide is tumor necrosis factor receptor superfamily member 25. In some embodiments, the stimulatory polypeptide is tumor necrosis factor receptor superfamily member 4.

[0350] In some embodiments, the chimeric protein comprises an extracellular domain of a TIGIT polypeptide, a transmembrane domain, and an intracellular domain, wherein the intracellular domain comprises the intracellular domain, or a portion thereof, of a stimulatory polypeptide that is associated with a positive signal that activates an immune cell. In some embodiments, the stimulatory polypeptide is CD226. In some embodiments, the stimulatory polypeptide is natural cytotoxicity triggering receptor 1. In some embodiments, the stimulatory polypeptide is CD160. In some embodiments, the stimulatory polypeptide is hematopoietic cell signal transducer. In some embodiments, the stimulatory polypeptide is TYRO protein tyrosine kinase-binding protein. In some embodiments, the stimulatory polypeptide is myeloid differentiation primary response protein MyD88. In some embodiments, the stimulatory polypeptide is granulocyte colony-stimulating factor receptor. In some embodiments, the stimulatory polypeptide is macrophage colony-stimulating factor 1 receptor. In some embodiments, the stimulatory polypeptide is erythropoietin receptor. In some embodiments, the stimulatory polypeptide is inducible T-cell costimulator. In some embodiments, the stimulatory polypeptide is T-cell-specific surface glycoprotein CD28. In some embodiments, the stimulatory polypeptide is Transmembrane and immunoglobulin domain-containing protein 2. In some embodiments, the stimulatory polypeptide is tumor necrosis factor receptor superfamily member 9. In some embodiments, the stimulatory polypeptide is tumor necrosis factor receptor superfamily member 25. In some embodiments, the stimulatory polypeptide is tumor necrosis factor receptor superfamily member 4.

[0351] Table 11 indicates exemplary chimeric protein constructs that comprise an extracellular domain, or a portion thereof, of a TIM-3 polypeptide.

TABLE 11
Exemplary chimeric protein constructs that comprise an extracellular domain, or
a portion thereof, of a TIM-3 polypeptide

| | ECD | | ICD | | | |
|---|---|---|---|---|---|---|
| | UNIPROT | | UNIPROT | ICD | | |
| ECD^{a} | ID | ICD^{b} | ID | isoform(s) | Class | Group |
| TIM-3 | Q8TDQ0 | CD226 antigen | Q15762 | 1 | Ig family | NK activating |
| | | | | | receptor | receptors |
| TIM-3 | Q8TDQ0 | Natural cytotoxicity | O76036 | 1 | Ig family | NK activating |
| | | triggering receptor 1 | | | receptor | receptors |
| TIM-3 | Q8TDQ0 | CD160 antigen | O95971 | 3 | Ig family | NK activating |
| | | | | | receptor | receptors |
| TIM-3 | Q8TDQ0 | Hematopoietic cell | Q9UBK5 | 1 | Adaptor | Signaling |
| | | signal transducer | | | | adaptors |
| TIM-3 | Q8TDQ0 | TYRO protein | O43914 | 1 | Adaptor | Signaling |
| | | tyrosine kinase- | | | | adaptors |
| | | binding protein | | | | |
| TIM-3 | Q8TDQ0 | Myeloid | Q99836 | 1, 2, 4, 6, 8 | Adaptor | Signaling |
| | | differentiation | | | | adaptors |
| | | primary response | | | | |
| | | protein MyD88 | | | | |
| TIM-3 | Q8TDQ0 | Granulocyte colony- | Q99062 | 1, 2, 3, 4 | Cytokine | Homodimerizing |
| | | stimulating factor | | | receptor | cytokines and |
| | | receptor | | | | growth factors |
| TIM-3 | Q8TDQ0 | Macrophage colony- | P07333 | 1 | Cytokine | Homodimerizing |
| | | stimulating factor 1 | | | receptor | cytokines and |
| | | receptor | | | | growth factors |
| TIM-3 | Q8TDQ0 | Erythropoietin | P19235 | 1 | Growth | Homodimerizing |
| | | receptor | | | factor | cytokines and |
| | | | | | receptor | growth factors |
| TIM-3 | Q8TDQ0 | Inducible T-cell | Q9Y6W8 | 1 | Ig family | TCR |
| | | costimulator | | | receptor | costimulatory |
| | | | | | | receptors |
| TIM-3 | Q8TDQ0 | T-cell-specific | P10747 | 1 | Ig family | TCR |
| | | surface glycoprotein | | | receptor | costimulatory |
| | | CD28 | | | | receptors |
| TIM-3 | Q8TDQ0 | Transmembrane and | Q96BF3 | 1, 2 | Ig family | TCR |
| | | immunoglobulin | | | receptor | costimulatory |
| | | domain-containing | | | | receptors |
| | | protein 2 | | | | |
| TIM-3 | Q8TDQ0 | Tumor necrosis | Q07011 | 1 | TNF | Tumor Necrosis |
| | | factor receptor | | | family | Family receptors |
| | | superfamily member | | | receptor | |
| | | 9 | | | | |
| TIM-3 | Q8TDQ0 | Tumor necrosis | Q93038 | 1 | TNF | Tumor Necrosis |
| | | factor receptor | | | family | Family receptors |
| | | superfamily member | | | receptor | |
| | | 25 | | | | |
| TIM-3 | Q8TDQ0 | Tumor necrosis | P43489 | 1 | TNF | Tumor Necrosis |
| | | factor receptor | | | family | Family receptors |
| | | superfamily member | | | receptor | |
| | | 4 | | | | |

aThe extracellular domain (ECD) refers to the ECD of an inhibitory polypeptide, or a portion thereof (e.g., TIM-3).
^{b}The intracellular domain (ICD) refers to the ICD of a stimulatory polypeptide, or a portion thereof (e.g., CD226 antigen).

[0352] In some embodiments, the chimeric protein comprises an extracellular domain of a TIM-3 polypeptide, a transmembrane domain, and an intracellular domain, wherein the intracellular domain comprises the intracellular domain, or a portion thereof, of a stimulatory polypeptide that is associated with a positive signal that activates an immune cell. In some embodiments, the stimulatory polypeptide is CD226, natural cytotoxicity triggering receptor 1, CD160, hematopoietic cell signal transducer, TYRO protein tyrosine kinase-binding protein, myeloid differentiation primary response protein MyD88, granulocyte colony-stimulating factor receptor, macrophage colony-stimulating factor 1 receptor, erythropoietin receptor, inducible T-cell costimulator, T-cell-specific surface glycoprotein CD28, transmembrane and immunoglobulin domain-containing protein 2, tumor necrosis factor receptor superfamily member 9, tumor necrosis factor receptor superfamily member 25, or tumor necrosis factor receptor superfamily member 4.

[0353] Table 12 indicates exemplary chimeric protein constructs that are capable of engaging an HLA-E signal, and domains thereof.

TABLE 12
Exemplary Chimeric Protein Constructs that Bind HLA-E, and Domains Thereof

| | ECD | | ICD | ICD | | |
|---|---|---|---|---|---|---|
| | UNIPROT | | UNIPROT | iso- | | |
| ECD^{a} | ID | ICD^{b} | ID | form(s) | Class | Group |
| NKG2A | P26715 | NKG2-D type II integral | P26718 | 1 | C-type | C-Type |
| | | membrane protein | | | lectin family | Lectins |
| | | | | | receptor | |
| NKG2A | P26715 | C-type lectin domain family | Q9BXN2 | 1 | C-type | C-Type |
| | | 7 member A | | | lectin family | Lectins |
| | | | | | receptor | |
| NKG2A | P26715 | Killer cell lectin-like | Q9NZS2 | 1 | C-type | C-Type |
| | | receptor subfamily F | | | lectin family | Lectins |
| | | member 1 | | | receptor | |
| NKG2A | P26715 | Killer cell lectin-like | D3W0D1 | 1 | C-type | C-Type |
| | | receptor subfamily F | | | lectin family | Lectins |
| | | member 2 | | | receptor | |
| NKG2A | P26715 | Tumor necrosis factor ligand | O43557 | 1 | TNF Family | TNF |
| | | superfamily member 14 | | | Ligand | Ligand |
| | | | | | | Family |
| NKG2A | P26715 | Tumor necrosis factor ligand | P41273 | 1 | TNF Family | TNF |
| | | superfamily member 9 | | | Ligand | Ligand |
| | | | | | | Family |
| NKG2A | P26715 | Tumor necrosis factor ligand | Q9Y275 | 1, 2, 3 | TNF Family | TNF |
| | | superfamily member 13B | | | Ligand | Ligand |
| | | | | | | Family |

^{a}The extracellular domain (ECD) refers to the ECD of an inhibitory polypeptide, or a portion thereof (e.g., NKG2A), or an scFv (e.g., ScFv specific for HLA-E).
^{b}The intracellular domain (ICD) refers to the ICD of a stimulatory polypeptide, or a portion thereof (e.g., NKG2-D type II integral membrane protein).

[0354] In some embodiments, the chimeric protein comprises an extracellular domain capable of binding HLA-E, a transmembrane domain, and an intracellular domain, wherein the intracellular domain comprises the intracellular domain, or a portion thereof, of a stimulatory polypeptide that is associated with a positive signal that activates an immune cell. In some embodiments, the stimulatory polypeptide is NKG2-D type II integral membrane protein, C-type lectin domain family 7 member A, killer cell lectin-like receptor subfamily F member 1, killer cell lectin-like receptor subfamily F member 2, tumor necrosis factor ligand superfamily member 14, tumor necrosis factor ligand superfamily member 9, or tumor necrosis factor ligand superfamily member 13B.

[0355] In some embodiments, the chimeric protein comprises an extracellular domain of an NKG2A polypeptide, a transmembrane domain, and an intracellular domain, wherein the intracellular domain comprises the intracellular domain, or a portion thereof, of a stimulatory polypeptide that is associated with a positive signal that activates an immune cell. In some embodiments, the stimulatory polypeptide is NKG2-D type II integral membrane protein, NKG2-C type II integral membrane protein, C-type lectin domain family 7 member A, killer cell lectin-like receptor subfamily F member 1, killer cell lectin-like receptor subfamily F member 2, tumor necrosis factor ligand superfamily member 14, tumor necrosis factor ligand superfamily member 9, or tumor necrosis factor ligand superfamily member 13B.

[0356] In some embodiments, the chimeric protein comprises an extracellular domain of a NKG2A polypeptide or a portion thereof, a transmembrane domain, and an intracellular domain, wherein the intracellular domain comprises the intracellular domain, or a portion thereof, of a NKG2C polypeptide. In some embodiments, the chimeric protein comprises an extracellular domain of a NKG2A polypeptide or a portion thereof, a transmembrane domain of a NKG2C polypeptide, and an intracellular domain, or a portion thereof, of a NKG2C polypeptide. In some embodiments, the chimeric protein comprises from N-terminus to C-terminus, an intracellular domain of a NKG2C polypeptide or a portion thereof, a transmembrane domain of a NKG2C polypeptide, and an extracellular domain of a NKG2A polypeptide or a portion thereof. In some embodiments, the chimeric protein comprises from N-terminus to C-terminus, an intracellular domain of a NKG2C polypeptide or a portion thereof, a transmembrane domain of a NKG2C polypeptide, a portion of an extracellular domain of a NKG2C polypeptide, and an extracellular domain of a NKG2A polypeptide. In some embodiments, the chimeric protein comprises an extracellular domain of a NKG2A polypeptide (e.g., SEQ ID NO: 45) or a portion thereof, a transmembrane domain of a NKG2C polypeptide (e.g., SEQ ID NO: 415), and an intracellular domain of a NKG2C polypeptide (e.g., SEQ ID NO: 199) or a portion thereof. In some embodiments, the chimeric protein comprises an amino acid sequence that is at least 80%, at least 85%, at least 90%, at least 91%, at least 92%, at least 93%, at least 94%, at least 95%, at least 96%, at least 97%, at least 98%, at least 99% or at least 100% identical to the amino acid sequence of SEQ ID NO: 677.

[0357] Table 13 indicates exemplary chimeric protein constructs that are capable of engaging an N-cadherin and/or E-cadherin signal, and domains thereof.

TABLE 13
Exemplary Chimeric Protein Constructs that Bind N-Cadherin and/or E-
Cadherin, and Domains Thereof

| | ECD | | ICD | ICD | | |
|---|---|---|---|---|---|---|
| | UNIPROT | | UNIPROT | iso- | | |
| ECD^{a} | ID | ICD^{b} | ID | form(s) | Class | Group |
| KLRG1 | Q96E93 | C-type lectin | Q9BXN2 | 1 | C-type lectin | C-Type |
| | | domain family 7 | | | family | Lectins |
| | | member A | | | receptor | |
| KLRG1 | Q96E93 | Killer cell lectin- | Q9NZS2 | 1 | C-type lectin | C-Type |
| | | like receptor | | | family | Lectins |
| | | subfamily F | | | receptor | |
| | | member 1 | | | | |
| KLRG1 | Q96E93 | Killer cell lectin- | D3W0D1 | 1 | C-type lectin | C-Type |
| | | like receptor | | | family | Lectins |
| | | subfamily F | | | receptor | |
| | | member 2 | | | | |
| KLRG1 | Q96E93 | Tumor necrosis | O43557 | 1 | TNF Family | TNF Ligand |
| | | factor ligand | | | Ligand | Family |
| | | superfamily | | | | |
| | | member 14 | | | | |
| KLRG1 | Q96E93 | Tumor necrosis | P41273 | 1 | TNF Family | TNF Ligand |
| | | factor ligand | | | Ligand | Family |
| | | superfamily | | | | |
| | | member 9 | | | | |
| KLRG1 | Q96E93 | Tumor necrosis | Q9Y275 | 1, 2, 3 | TNF Family | TNF Ligand |
| | | factor ligand | | | Ligand | Family |
| | | superfamily | | | | |
| | | member 13B | | | | |

^{a}The extracellular domain (ECD) refers to the ECD of an inhibitory polypeptide, or a portion thereof (e.g., KLRG1), or an scFv (e.g., scFv specific for N-cadherin and/or E-cadherin).
^{b}The intracellular domain (ICD) refers to the ICD of a stimulatory polypeptide, or a portion thereof (e.g., C-type lectin domain family 7 member A).

[0358] In some embodiments, the chimeric protein comprises an extracellular domain capable of binding N-cadherin and/or E-cadherin, a transmembrane domain, and an intracellular domain, wherein the intracellular domain comprises the intracellular domain, or a portion thereof, of a stimulatory polypeptide that is associated with a positive signal that activates an immune cell. In some embodiments, the stimulatory polypeptide is C-type lectin domain family 7 member A, killer cell lectin-like receptor subfamily F member 1, killer cell lectin-like receptor subfamily F member 2, tumor necrosis factor ligand superfamily member 14, tumor necrosis factor ligand superfamily member 9, or tumor necrosis factor ligand superfamily member 13B.

[0359] In some embodiments, the chimeric protein comprises an extracellular domain of a KLRG1 polypeptide, a transmembrane domain, and an intracellular domain, wherein the intracellular domain comprises the intracellular domain, or a portion thereof, of a stimulatory polypeptide that is associated with a positive signal that activates an immune cell. In some embodiments, the stimulatory polypeptide is C-type lectin domain family 7 member A, killer cell lectin-like receptor subfamily F member 1, killer cell lectin-like receptor subfamily F member 2, tumor necrosis factor ligand superfamily member 14, tumor necrosis factor ligand superfamily member 9, or tumor necrosis factor ligand superfamily member 13B.

[0360] Table 14 indicates exemplary chimeric protein constructs that are capable of engaging an IL-18 signal, and domains thereof.

TABLE 14
Exemplary Chimeric Protein Constructs that Bind IL-18, and Domains Thereof

| | ECD | | ICD | ICD | | |
|---|---|---|---|---|---|---|
| | UNIPROT | | UNIPROT | iso- | | |
| ECD^{a} | ID | ICD^{b} | ID | form(s) | Class | Group |
| IL-18BP | O95998 | Interleukin-18 | Q13478 | 1 | Cytokine | Enhanced |
| isoform A | | receptor 1 | | | receptor | affinity IL-18R |
| IL-18BP | O95998 | Interleukin-18 | Q13478 | 1 | Cytokine | Enhanced |
| isoform B | | receptor 1 | | | receptor | affinity IL-18R |
| IL-18BP | O95998 | Interleukin-18 | Q13478 | 1 | Cytokine | Enhanced |
| isoform C | | receptor 1 | | | receptor | affinity IL-18R |
| IL-18BP | O95998 | Interleukin-18 | Q13478 | 1 | Cytokine | Enhanced |
| isoform D | | receptor 1 | | | receptor | affinity IL-18R |

^{a}The extracellular domain (ECD) refers to the ECD of an inhibitory polypeptide, or a portion thereof (e.g., IL-18BP), or an scFv (e.g., ScFv specific for IL-18).
^{b}The intracellular domain (ICD) refers to the ICD of a stimulatory polypeptide, or a portion thereof (e.g., IL-18R1).

[0361] In some embodiments, the chimeric protein comprises an extracellular domain capable of binding IL-18, a transmembrane domain, and an intracellular domain, wherein the intracellular domain comprises the intracellular domain, or a portion thereof, of a stimulatory polypeptide that is associated with a positive signal that activates an immune cell. In some embodiments, the stimulatory polypeptide is interleukin-18 receptor 1.

[0362] In some embodiments, the chimeric protein comprises an extracellular domain of an IL-18BP polypeptide, a transmembrane domain, and an intracellular domain, wherein the intracellular domain comprises the intracellular domain, or a portion thereof, of a stimulatory polypeptide that is associated with a positive signal that activates an immune cell. In some embodiments, the IL-18BP polypeptide is selected from any one of IL-18BP isoform A, IL-18BP isoform B, IL-18BP isoform C, and IL-18BP isoform D. In some embodiments, the stimulatory polypeptide is interleukin-18 receptor 1.

[0363] In some embodiments, the chimeric protein comprises an extracellular domain of a FAS polypeptide, a transmembrane domain, and an intracellular domain, wherein the intracellular domain comprises the intracellular domain, or a portion thereof, of a DR3 polypeptide. In some embodiments, the chimeric protein comprises an extracellular domain of a FAS polypeptide (e.g., SEQ ID NO: 11), a transmembrane domain of a DR3 polypeptide, and an intracellular domain a DR3 polypeptide, and optionally a signal peptide of a FAS polypeptide (e.g., SEQ ID NO: 469). In some embodiments, the chimeric protein comprises an extracellular domain of a Fas polypeptide (e.g., SEQ ID NO: 11), a transmembrane domain of a DR3 polypeptide (e.g., SEQ ID NO: 395), and an intracellular domain of a DR3 polypeptide (e.g., SEQ ID NO: 179). In some embodiments, the chimeric protein comprises an amino acid sequence that is at least 80%, at least 85%, at least 90%, at least 91%, at least 92%, at least 93%, at least 94%, at least 95%, at least 96%, at least 97%, at least 98%, at least 99% or at least 100% identical to the amino acid sequence of SEQ ID NOs: 678 or 679.

[0364] In some embodiments, the chimeric protein comprises a combination of an extracellular domain (ECD), an intracellular domain (ICD) and an intracellular domain (ICD) of an exemplary chimeric protein described in Table 22. In some embodiments, the chimeric protein comprises a combination of an extracellular domain (ECD), an intracellular domain (ICD) and an intracellular domain (ICD) of any one of the exemplary chimeric proteins of A1-A226 (described in Table 22). Each of the domains of the exemplary chimeric proteins, including amino acid sequences for each domain, is described in the disclosure.

TABLE 22
Exemplary Chimeric Proteins

| No. | ECD | TM | ICD |
|---|---|---|---|
| A1 | PD1 | EPOR | EPOR |
| A2 | PD1 | GCSFR | GCSFR |
| A3 | PD1 | CSF1R | CSF1R |
| A4 | PD1 | NKp46 | NKp46 |
| A5 | PD1 | DR3 | DR3 |
| A6 | PD1 | YES1 | YES1 |
| A7 | TIGIT | CD28 | 2B4 |
| A8 | TIGIT | CD28 | SLAMF1 |
| A9 | TIGIT | CD28 | SLAMF5 |
| A10 | TIGIT | CD28 | SLAMF6 |
| A11 | TIGIT | CD28 | SLAMF7 |
| A12 | TIGIT | CD28 | SLAMF3 |
| A13 | TIGIT | CD28 | EPOR |
| A14 | TIGIT | CD28 | GCSFR |
| A15 | TIGIT | CD28 | CSF1R |
| A16 | TIGIT | CD28 | NKp46 |
| A17 | TIGIT | CD28 | DR3 |
| A18 | TIGIT | CD28 | YES1 |
| A19 | TIGIT | TIGIT | 2B4 |
| A20 | TIGIT | TIGIT | SLAMF1 |
| A21 | TIGIT | TIGIT | SLAMF5 |
| A22 | TIGIT | TIGIT | SLAMF6 |
| A23 | TIGIT | TIGIT | SLAMF7 |
| A24 | TIGIT | TIGIT | SLAMF3 |
| A25 | TIGIT | TIGIT | EPOR |
| A26 | TIGIT | TIGIT | GCSFR |
| A27 | TIGIT | TIGIT | CSF1R |
| A28 | TIGIT | TIGIT | NKp46 |
| A29 | TIGIT | TIGIT | DR3 |
| A30 | TIGIT | TIGIT | YES1 |
| A31 | TIGIT | 2B4 | 2B4 |
| A32 | TIGIT | SLAMF1 | SLAMF1 |
| A33 | TIGIT | SLAMF5 | SLAMF5 |
| A34 | TIGIT | SLAMF6 | SLAMF6 |
| A35 | TIGIT | SLAMF7 | SLAMF7 |
| A36 | TIGIT | SLAMF3 | SLAMF3 |
| A37 | TIGIT | EPOR | EPOR |
| A38 | TIGIT | GCSFR | GCSFR |
| A39 | TIGIT | CSF1R | CSF1R |
| A40 | TIGIT | NKp46 | NKp46 |
| A41 | TIGIT | DR3 | DR3 |
| A42 | TIGIT | YES1 | YES1 |
| A43 | TIM3 | CD28 | 2B4 |
| A44 | TIM3 | CD28 | SLAMF1 |
| A45 | TIM3 | CD28 | SLAMF5 |
| A46 | TIM3 | CD28 | SLAMF6 |
| A47 | TIM3 | CD28 | SLAMF7 |
| A48 | TIM3 | CD28 | SLAMF3 |
| A49 | TIM3 | CD28 | EPOR |
| A50 | TIM3 | CD28 | GCSFR |
| A51 | TIM3 | CD28 | CSF1R |
| A52 | TIM3 | CD28 | NKp46 |
| A53 | TIM3 | CD28 | DR3 |
| A54 | TIM3 | CD28 | YES1 |
| A55 | TIM3 | TIM3 | 2B4 |
| A56 | TIM3 | TIM3 | SLAMF1 |
| A57 | TIM3 | TIM3 | SLAMF5 |
| A58 | TIM3 | TIM3 | SLAMF6 |
| A59 | TIM3 | TIM3 | SLAMF7 |
| A60 | TIM3 | TIM3 | SLAMF3 |
| A61 | TIM3 | TIM3 | EPOR |
| A62 | TIM3 | TIM3 | GCSFR |
| A63 | TIM3 | TIM3 | CSF1R |
| A64 | TIM3 | TIM3 | NKp46 |
| A65 | TIM3 | TIM3 | DR3 |
| A66 | TIM3 | TIM3 | YES1 |
| A67 | TIM3 | 2B4 | 2B4 |
| A68 | TIM3 | SLAMF1 | SLAMF1 |
| A69 | TIM3 | SLAMF5 | SLAMF5 |
| A70 | TIM3 | SLAMF6 | SLAMF6 |
| A71 | TIM3 | SLAMF7 | SLAMF7 |
| A72 | TIM3 | SLAMF3 | SLAMF3 |
| A73 | TIM3 | EPOR | EPOR |
| A74 | TIM3 | GCSFR | GCSFR |
| A75 | TIM3 | CSF1R | CSF1R |
| A76 | TIM3 | NKp46 | NKp46 |
| A77 | TIM3 | DR3 | DR3 |
| A78 | TIM3 | YES1 | YES1 |
| A79 | FAS | CD28 | 2B4 |
| A80 | FAS | CD28 | SLAMF1 |
| A81 | FAS | CD28 | SLAMF5 |
| A82 | FAS | CD28 | SLAMF6 |
| A83 | FAS | CD28 | SLAMF7 |
| A84 | FAS | CD28 | SLAMF3 |
| A85 | FAS | CD28 | EPOR |
| A86 | FAS | CD28 | GCSFR |
| A87 | FAS | CD28 | CSF1R |
| A88 | FAS | CD28 | NKp46 |
| A89 | FAS | CD28 | DR3 |
| A90 | FAS | CD28 | YES1 |
| A91 | FAS | FAS | 2B4 |
| A92 | FAS | FAS | SLAMF1 |
| A93 | FAS | FAS | SLAMF5 |
| A94 | FAS | FAS | SLAMF6 |
| A95 | FAS | FAS | SLAMF7 |
| A96 | FAS | FAS | SLAMF3 |
| A97 | FAS | FAS | EPOR |
| A98 | FAS | FAS | GCSFR |
| A99 | FAS | FAS | CSF1R |
| A100 | FAS | FAS | NKp46 |
| A101 | FAS | FAS | DR3 |
| A102 | FAS | FAS | YES1 |
| A103 | FAS | 2B4 | 2B4 |
| A104 | FAS | SLAMF1 | SLAMF1 |
| A105 | FAS | SLAMF5 | SLAMF5 |
| A106 | FAS | SLAMF6 | SLAMF6 |
| A107 | FAS | SLAMF7 | SLAMF7 |
| A108 | FAS | SLAMF3 | SLAMF3 |
| A109 | FAS | EPOR | EPOR |
| A110 | FAS | GCSFR | GCSFR |
| A111 | FAS | CSF1R | CSF1R |
| A112 | FAS | NKp46 | NKp46 |
| A113 | FAS | DR3 | DR3 |
| A114 | FAS | YES1 | YES1 |
| A115 | NKG2A | NKG2C | NKG2C |
| A116 | FAS | DR3 | DR3 |
| A117 | TGFBR2 | TGFBR2 | IL-21R |
| A118 | TGFBR2 | IL-2RG | IL-2RG |
| A119 | TGFBR2 | TGFBR2 | IL-2RG |
| A120 | TGFBR2 | IL-21R | IL-21R |
| A121 | TGFBR1 | IL-2RG | IL-2RG |
| A122 | TGFBR1 | TGFBR1 | IL-21R |
| A123 | TGFBR1 | TGFBR1 | IL-2RG |
| A124 | TGFBR1 | IL-2RG | IL-2RG |
| A125 | BTLA | CD28 | 2B4 |
| A126 | BTLA | CD28 | SLAMF1 |
| A127 | BTLA | CD28 | SLAMF5 |
| A128 | BTLA | CD28 | SLAMF6 |
| A129 | BTLA | CD28 | SLAMF7 |
| A130 | BTLA | CD28 | SLAMF3 |
| A131 | BTLA | CD28 | EPOR |
| A132 | BTLA | CD28 | GCSFR |
| A133 | BTLA | CD28 | CSF1R |
| A134 | BTLA | CD28 | NKp46 |
| A135 | BTLA | CD28 | DR3 |
| A136 | BTLA | CD28 | YES1 |
| A137 | BTLA | BTLA | 2B4 |
| A138 | BTLA | BTLA | SLAMF1 |
| A139 | BTLA | BTLA | SLAMF5 |
| A140 | BTLA | BTLA | SLAMF6 |
| A141 | BTLA | BTLA | SLAMF7 |
| A142 | BTLA | BTLA | SLAMF3 |
| A143 | BTLA | BTLA | EPOR |
| A144 | BTLA | BTLA | GCSFR |
| A145 | BTLA | BTLA | CSF1R |
| A146 | BTLA | BTLA | NKp46 |
| A147 | BTLA | BTLA | DR3 |
| A148 | BTLA | BTLA | YES1 |
| A149 | BTLA | 2B4 | 2B4 |
| A150 | BTLA | SLAMF1 | SLAMF1 |
| A151 | BTLA | SLAMF5 | SLAMF5 |
| A152 | BTLA | SLAMF6 | SLAMF6 |
| A153 | BTLA | SLAMF7 | SLAMF7 |
| A154 | BTLA | SLAMF3 | SLAMF3 |
| A155 | BTLA | EPOR | EPOR |
| A156 | BTLA | GCSFR | GCSFR |
| A157 | BTLA | CSF1R | CSF1R |
| A158 | BTLA | NKp46 | NKp46 |
| A159 | BTLA | DR3 | DR3 |
| A160 | BTLA | YES1 | YES1 |
| A161 | LILRB2 | CD28 | 2B4 |
| A162 | LILRB2 | CD28 | SLAMF1 |
| A163 | LILRB2 | CD28 | SLAMF5 |
| A164 | LILRB2 | CD28 | SLAMF6 |
| A165 | LILRB2 | CD28 | SLAMF7 |
| A166 | LILRB2 | CD28 | SLAMF3 |
| A167 | LILRB2 | CD28 | EPOR |
| A168 | LILRB2 | CD28 | GCSFR |
| A169 | LILRB2 | CD28 | CSF1R |
| A170 | LILRB2 | CD28 | NKp46 |
| A171 | LILRB2 | CD28 | DR3 |
| A172 | LILRB2 | CD28 | YES1 |
| A173 | LILRB2 | LILRB2 | 2B4 |
| A174 | LILRB2 | LILRB2 | SLAMF1 |
| A175 | LILRB2 | LILRB2 | SLAMF5 |
| A176 | LILRB2 | LILRB2 | SLAMF6 |
| A177 | LILRB2 | LILRB2 | SLAMF7 |
| A178 | LILRB2 | LILRB2 | SLAMF3 |
| A179 | LILRB2 | LILRB2 | EPOR |
| A180 | LILRB2 | LILRB2 | GCSFR |
| A181 | LILRB2 | LILRB2 | CSF1R |
| A182 | LILRB2 | LILRB2 | NKp46 |
| A183 | LILRB2 | LILRB2 | DR3 |
| A184 | LILRB2 | LILRB2 | YES1 |
| A185 | LILRB2 | 2B4 | 2B4 |
| A186 | LILRB2 | SLAMF1 | SLAMF1 |
| A187 | LILRB2 | SLAMF5 | SLAMF5 |
| A188 | LILRB2 | SLAMF6 | SLAMF6 |
| A189 | LILRB2 | SLAMF7 | SLAMF7 |
| A190 | LILRB2 | SLAMF3 | SLAMF3 |
| A191 | LILRB2 | EPOR | EPOR |
| A192 | LILRB2 | GCSFR | GCSFR |
| A193 | LILRB2 | CSF1R | CSF1R |
| A194 | LILRB2 | NKp46 | NKp46 |
| A195 | LILRB2 | DR3 | DR3 |
| A196 | LILRB2 | YES1 | YES1 |
| A197 | PD1 | CD28 | 2B4 |
| A198 | PD1 | CD28 | SLAMF1 |
| A199 | PD1 | CD28 | SLAMF5 |
| A200 | PD1 | CD28 | SLAMF6 |
| A201 | PD1 | CD28 | SLAMF7 |
| A202 | PD1 | CD28 | SLAMF3 |
| A203 | PD1 | CD28 | EPOR |
| A204 | PD1 | CD28 | GCSFR |
| A205 | PD1 | CD28 | CSF1R |
| A206 | PD1 | CD28 | NKp46 |
| A207 | PD1 | CD28 | DR3 |
| A208 | PD1 | CD28 | YES1 |
| A209 | PD1 | PD1 | 2B4 |
| A210 | PD1 | PD1 | SLAMF1 |
| A211 | PD1 | PD1 | SLAMF5 |
| A212 | PD1 | PD1 | SLAMF6 |
| A213 | PD1 | PD1 | SLAMF7 |
| A214 | PD1 | PD1 | SLAMF3 |
| A215 | PD1 | PD1 | EPOR |
| A216 | PD1 | PD1 | GCSFR |
| A217 | PD1 | PD1 | CSF1R |
| A218 | PD1 | PD1 | NKp46 |
| A219 | PD1 | PD1 | DR3 |
| A220 | PD1 | PD1 | YES1 |
| A221 | PD1 | 2B4 | 2B4 |
| A222 | PD1 | SLAMF1 | SLAMF1 |
| A223 | PD1 | SLAMF5 | SLAMF5 |
| A224 | PD1 | SLAMF6 | SLAMF6 |
| A225 | PD1 | SLAMF7 | SLAMF7 |
| A226 | PD1 | SLAMF3 | SLAMF3 |

### Cytokines

[0365] In some aspects, the disclosure provides cells and populations of cells (e.g., immune cells such as NK cells) comprising (e.g., modified to express) a chimeric protein described above and one or more cytokines, chemokine receptors, heparanase, a therapeutic agent, or an protein that may assist the immune cell overcome immunosuppression in a tumor microenvironment. In some embodiments, a cell (e.g., immune cell) provided herein comprises (e.g., is modified to express) at least one therapeutic agent selected from p40, LIGHT, CD40L, FLT3L, 4-1BBL, FasL, and heparanase.

[0366] In some embodiments, the present disclosure provides cells, e.g., immune cells (e.g., NK cells), engineered to comprise (e.g., express) an engineered protein (e.g., chimeric protein), wherein the engineered protein (e.g., chimeric protein) comprises a) an extracellular domain, b) a transmembrane domain, c) an intracellular domain, and/or d) a linker, and which are further engineered to comprise (e.g., express) a membrane-bound cytokine. In some embodiments, the membrane-bound cytokine acts in synergy with the one or more of the engineered proteins (e.g., chimeric proteins) disclosed herein. In some embodiments, the cytokine comprises at least one chemokine, interferon, interleukin, lymphokine, tumor necrosis factor, or variant or combination thereof. In some embodiments, the cytokine is an interleukin, e.g., IL-15, IL-21, IL-2, IL-12, IL-18, IL-21, IL-1, IL-3, IL-4, IL-5, IL-6, IL-7, IL-8, IL-9, IL-10, IL-11, IL-13, IL-14, IL-15, IL-16, IL-17, IL-19, IL-20, IL-22, IL-23, IL-24, IL-25, IL-26, IL-27, IL-28, IL-29, IL-30, IL-31, IL-32, IL-33, or a functional variant, fragment, or combination thereof. In some embodiments, any of the cytokines provided above can be a membrane-bound cytokine or a secreted cytokine. In some embodiments, the cytokine is a membrane-bound cytokine comprising IL-21, or a functional variant or fragment thereof. In some embodiments, the cytokine is a membrane-bound cytokine comprising IL-18, or a functional variant of fragment thereof. In some embodiments, the cytokine is a membrane-bound cytokine comprising IL-12, or a functional variant or fragment thereof. In some embodiments, the cytokine is a membrane-bound cytokine comprising IL-15, or a functional variant or fragment thereof. In some embodiments, the cytokine is a membrane-bound cytokine comprising IL-15Ra, or a functional variant or fragment thereof. In some embodiments, the cytokine is a membrane-bound cytokine comprising an IL-15/IL-15Ra complex. In some embodiments, the cytokine comprises one or both of IL-21 and IL-21R. In some embodiments, the cytokine comprises one or both of EL-18 and IL-18Ra. In some embodiments, the cytokine comprises one or both of IL-12 and IL-12Rβ1. In some embodiments, the cytokine comprises one or both of IL-15 and IL-15Ra.

[0367] In some embodiments, a cell provided herein comprises (e.g., is modified to express) one or more of IL-12, membrane-bound IL-12, and a fusion protein comprising IL12 subunits p35 and p40.

[0368] In some embodiments, a cell provided herein includes a membrane-bound cytokine and cytokine receptor (e.g., the cytokine's cognate receptor).

[0369] In some embodiments, the expression of any of cytokines described above can be under the control of an inducible promoter for gene transcription within the cell. In some embodiments, the inducible promoter is an EF1a promoter. In some embodiments, the inducible promoter is a PGK promoter.

[0370] In some embodiments, a cell provided herein comprises (e.g., is engineered to express) an interleukin. In some embodiments, the interleukin can comprise soluble or secreted IL-15, membrane-bound IL-15 (mbIL-15), a IL-15 receptor alpha (mbIL-15Ra), a mbIL-15 with IL-15Ra, a fusion of IL-15 and IL-15Ra, or a soluble IL-15 with IL-15Ra. In some embodiments, the IL-15 is a soluble or secreted IL-15 that complexes with IL-15Ra (e.g., on the surface of the cell). Exemplary membrane bound IL-15 (mbIL-15) proteins and fusion proteins including IL-15 and IL-15Ra are described in U.S. Pat. Nos. 10,428,305 and 9,629,877, each of which is incorporated herein by reference in its entirety. Exemplary membrane-bound IL-15 proteins are also described in Hurton et al. Proc. Nat'l. Acad. Sci. U.S.A 113(48):E7788-97, 2016, incorporated herein by reference in its entirety.

[0371] In some embodiments, a cell provided herein comprises (e.g., is engineered to express) an cytokine. In some embodiments, the cytokine is IL-15 or a fragment or variant thereof. In some embodiments, the cytokine is a complex of IL-15 or a fragment or variant thereof, and a IL-15 receptor alpha (IL-15Ra) or a fragment or variant thereof. In some embodiments, the IL-15 or a fragment or variant thereof and the IL-15Ra or fragment or variant thereof are expressed as a fusion polypeptide. In embodiments relating to IL-15 fusion polypeptides, the IL-15 may include a full-length IL-15 (e.g., a native IL-15 polypeptide) or fragment or variant thereof, fused in frame with a full-length IL-15Ra or functional fragment or variant thereof. In some embodiments, the IL-15 is linked to the IL-15Ra through a linker.

[0372] In some embodiments, a modified cell (e.g., an NK cell) expressing an engineered protein (e.g., chimeric protein) described herein further expresses a membrane-associated IL-15/IL-15Ra. In some embodiments, the mbIL-15 comprises a fusion protein between IL-15 and IL-15Ra. In a preferred embodiment, the mbIL-15 is a IL-15 and IL-15Ra linked by a 2A sequence.

[0373] In some embodiments, the IL-15 comprises an amino acid sequence having at least 90%, at least 91%, at least 92%, at least 93%, at least 94%, at least 95%, at least 96%, at least 97%, at least 98%, at least 99%, or 100% identity with the amino acid sequence of any one of SEQ ID NOs: 501-503.

[0374] In some embodiments, the mbIL-15Ra comprises an amino acid sequence having at least 90%, at least 91%, at least 92%, at least 93%, at least 94%, at least 95%, at least 96%, at least 97%, at least 98%, at least 99%, or 100% identity with the amino acid sequence of SEQ ID NOs: 504-506.

[0375] In some embodiments, a cell (e.g., an immune cell) described herein comprises (e.g., is modified to express) a IgE Leader-IL-15-SG₃-(SG₄)₅-SG₃-IL-15Ra) construct. In some embodiments, the IgE Leader-IL-15-SG₃-(SG₄)₅-SG₃-IL-15Ra) construct comprises an amino acid sequence having at least 90%, at least 91%, at least 92%, at least 93%, at least 94%, at least 95%, at least 96%, at least 97%, at least 98%, at least 99%, or 100% identity with the amino acid sequence of SEQ ID NO: 507.

[0376] In some embodiments, a cell (e.g., an immune cell) described herein comprises (e.g., is modified to express) a IgE leader-IL-15-CD8a Tm+hinge construct. In some embodiments, the IgE leader-IL-15-CD8a Tm+hinge construct comprises an amino acid sequence having at least 90%, at least 91%, at least 92%, at least 93%, at least 94%, at least 95%, at least 96%, at least 97%, at least 98%, at least 99%, or 100% identity with the amino acid sequence of SEQ ID NO: 508.

[0377] In some embodiments, a cell (e.g., an immune cell) described herein comprises (e.g., is modified to express) a IL-15-(GS)₁₅-IL-15Ra₍₂₀₆₋₂₆₇₎. In some embodiments, the IL-15-(GS)₁₅-IL-15Ra₍₂₀₆₋₂₆₇₎ construct comprises an amino acid sequence having at least 90%, at least 91%, at least 92%, at least 93%, at least 94%, at least 95%, at least 96%, at least 97%, at least 98%, at least 99%, or 100% identity with the amino acid sequence of SEQ ID NO: 509.

[0378] In some embodiments, the present disclosure is directed to co-modifying cells (e.g., NK cells) with IL-15. In addition to IL-15, other cytokines are also envisioned for expression on a modified cell of the disclosure. These include, but are not limited to, cytokines, chemokines, and other molecules that contribute to the persistence, activation and proliferation of cells used for human application. NK cells expressing IL-15 are capable of continued supportive cytokine signaling, which is critical to their survival post-infusion.

[0379] In some embodiments, an engineered protein (e.g., chimeric protein) provided herein and the cytokine are each encoded by a separate vector. In some embodiments, the cytokine is IL-15 or IL-15/IL-15Ra.

TABLE A
Exemplary Cytokines

| | | |
|---|---|---|
| IL-15 | MRISKPHLRSISIQCYLCLLLNSHFLTEAGIHVFILGCFSAGLP | 501 |
| leader, pro- | KTEANWVNVISDLKKIEDLIQSMHIDATLYTESDVHPSCK | |
| peptide, mature | VTAMKCFLLELQVISLESGDASIHDTVENLIILANNSLSSN | |
| cytokine | GNVTESGCKECEELEEKNIKEFLQSFVHIVQMFINTS | |
| IL-15 | RISKPHLRSISIQCYLCLLLNSHFLTEAGIHVFILGCFSAGLPKT | 502 |
| leader, pro- | EANWVNVISDLKKIEDLIQSMHIDATLYTESDVHPSCKVTAM | |
| peptide, mature | KCFLLELQVISLESGDASIHDTVENLIILANNSLSSNGNVTESG | |
| cytokine | CKECEELEEKNIKEFLQSFVHIVQMFINTS | |
| IL-I5 | NWVNVISDLKKIEDLIQSMHIDATLYTESDVHPSCKVTAMKC | 503 |
| | FLLELQVISLESGDASIHDTVENLIILANNSLSSNGNVTESGCK | |
| | ECEELEEKNIKEFLQSFVHIVQMFINTS | |
| mbIL-15Ra | MAPRRARGCRTLGLPALLLLLLLRPPATRGITCPPPMSVE | 504 |
| leader, | HADIWVKSYSLYSRERYICNSGFKRKAGTSSLTECVLNKATN | |
| extracellular, | VAHWTTPSLKCIRDPALVHQRPAPPSTVTTAGVTPQPESLSPS | |
| transmembrane | GKEPAASSPSSNNTAATTAAIVPGSQLMPSKSPSTGTTEISSHE | |
| domain | SSHGTPSQTTAKNWELTASASHQPPGVYPQGHSDTTVAISTS | |
| intracellular | TVLLCGLSAVSLLACYLKSRQTPPLASVEMEAMEALPVTWGTS | |
| domain | SRDEDLENCSHHL | |
| mbIL-15Ra | APRRARGCRTLGLPALLLLLLLRPPATRGITCPPPMSVEHADI | 505 |
| leader, | WVKSYSLYSRERYICNSGFKRKAGTSSLTECVLNKATNVAH | |
| extracellular, | WTTPSLKCIRDPALVHQRPAPPSTVTTAGVTPQPESLSPSGKE | |
| transmembrane | PAASSPSSNNTAATTAAIVPGSQLMPSKSPSTGTTEISSHESSH | |
| domain | GTPSQTTAKNWELTASASHQPPGVYPQGHSDTTVAISTSTVL | |
| intracellular | LCGLSAVSLLACYLKSRQTPPLASVEMEAMEALPVTWGTSS | |
| domain | RDEDLENCSHHL | |
| mbIL-15Ra | ITCPPPMSVEHADIWVKSYSLYSRERYICNSGFKRKAGTSSLT | 506 |
| | ECVLNKATNVAHWTTPSLKCIRDPALVHQRPAPPSTVTTAG | |
| | VTPQPESLSPSGKEPAASSPSSNNTAATTAAIVPGSQLMPSKS | |
| | PSTGTTEISSHESSHGTPSQTTAKNWELTASASHQPPGVYPQG | |
| | HSDTTVAISTSTVLLCGLSAVSLLACYLKSRQTPPLASVEMEA | |
| | MEALPVTWGTSSRDEDLENCSHHL | |
| IgE Leader-IL-15- | MDWTWILFLVAAATRVHSNWVNVISDLKKIEDLIQSMHID | 507 |
| SG₃-(SG₄)₅-SG₃- | ATLYTESDVHPSCKVTAMKCFLLELQVISLESGDASIHDT | |
| IL15Ra) | VENLIILANNSLSSNGNVTESGCKECEELEEKNIKEFLQSF | |
| IgE Leader, IL-15, | VHIVQMFINTSSGGGSGGGGSGGGGSGGGGSGGGGSGGGG | |
| linker, IL-15Ra | SGGGITCPPPMSVEHADIWVKSYSLYSRERYICNSGFKRKAGTSSL | |
| | TECVLNKATNVAHWTTPSLKCIRDPALVHQRPAPPSTVTTAGVTP | |
| | QPESLSPSGKEPAASSPSSNNTAATTAAIVPGSQLMPSKSPSTGTT | |
| | EISSHESSHGTPSQTTAKNWELTASASHQPPGVYPQGHSDTTVAI | |
| | STSTVLLCGLSAVSLLACYLKSRQTPPLASVEMEAMEALPVTWGT | |
| | SSRDEDLENCSHHL | |
| IgE leader-IL-15- | MDWTWILFLVAAATRVHSNWVNVISDLKKIEDLIQSMHID | 508 |
| CD8a Tm + hinge | ATLYTESDVHPSCKVTAMKCFLLELQVISLESGDASIHDT | |
| IgE Leader, IL-15, | VENLIILANNSLSSNGNVTESGCKECEELEEKNIKEFLQSF | |
| CD8TM, hinge | VHIVQMFINTSTTTPAPRPPTPAPTIASQPLSLRPEACRPAAGGA | |
| | VHTRGLDFACDIYIWAPLAGTCGVLLLSLVITLYC | |
| IL15-(GS)₁₅- | MDWTWILFLVAAATRVHSNWVNVISDLKKIEDLIQSMHID | 509 |
| IL15Ra₍₂₀₆₋₂₆₇₎ | ATLYTESDVHPSCKVTAMKCFLLELQVISLESGDASIHDTVE | |
| | NLIILANNSLSSNGNVTESGCKECEELEEKNIKEFLQSFVHIVQ | |
| | MFINTSGSGSGSGSGSGSGSGSGSGSGSGSGSGSGSVAISTSTVL | |
| | LCGLSAVSLLACYLKSRQTPPLASVEMEAMEALPVTWGTSS | |
| | RDEDLENCSHHL | |

[0380] Suitable linkers, which are known to one skilled in the art, may be used, e.g., to link two cytokine polypeptides, e.g., IL-15 and IL-15RA. In certain embodiments, the use of internal ribosome entry sites (IRES) elements are used to create multigene, or polycistronic, messages. IRES elements are able to bypass the ribosome scanning model of 5′ methylated Cap dependent translation and begin translation at internal sites. IRES elements from two members of the picornavirus family (polio and encephalomyocarditis) have been described, as well an IRES from a mammalian message. IRES elements can be linked to heterologous open reading frames. Multiple open reading frames can be transcribed together, each separated by an IRES, creating polycistronic messages. By virtue of the IRES element, each open reading frame is accessible to ribosomes for efficient translation. Multiple genes can be efficiently expressed using a single promoter/enhancer to transcribe a single message.

[0381] 2A sequence elements can be used to create linked- or co-expression of genes in the constructs provided in the present disclosure. For example, cleavage sequences could be used to co-express genes by linking open reading frames to form a single cistron. Exemplary cleavage sequences include but are not limited to T2A, P2A, E2A and F2A, as described in Table B. In a preferred embodiment, the cleavage sequence comprises a P2A sequence.

TABLE B
Exemplary 2A Sequences

| | | |
|---|---|---|
| T2A | GSGEGRGSLLTCGDVEENPGP | 510 |
| P2A | GSGATNFSLLKQAGDVEENPGP | 511 |
| E2A | GSGQCTNYALLKLAGDVESNPGP | 512 |
| F2A | GSGVKQTLNFDLLKLAGDVESNPGP | 513 |

[0382] In some embodiments, T2A comprises an amino acid sequence having at least 90%, 91%, 92%, 93%, 94%, 95%, 96%, 97%, 98%, 99% or 100% identity with the amino acid sequence of SEQ ID NO: 510.

[0383] In some embodiments, P2A comprises an amino acid sequence having at least 90%, 91%, at least 92%, at least 93%, at least 94%, at least 95%, at least 96%, at least 97%, at least 98%, at least 99%, or 100% identity with the amino acid sequence of SEQ ID NO: 511.

[0384] In some embodiments, E2A comprises an amino acid sequence having at least 90%, at least 91%, at least 92%, at least 93%, at least 94%, at least 95%, at least 96%, at least 97%, at least 98%, at least 99%, or 100% identity with the amino acid sequence of SEQ ID NO: 512.

[0385] In some embodiments, F2A comprises an amino acid sequence having at least 90%, at least 91%, at least 92%, at least 93%, at least 94%, at least 95%, at least 96%, at least 97%, at least 98%, at least 99%, or 100% identity with the amino acid sequence of SEQ ID NO: 513. In some embodiments, a cell (e.g., an immune cell) described herein comprises (e.g., is modified to express) a chemokine or a chemokine receptor. Chemokines are a group of proteins that regulate cell trafficking and play roles in the regulation of immune response and homing of immune cells to tumors. Transgenic expression of chemokine receptors CCR2b or CXCR2 in T cells enhances trafficking to CCL2- or CXCL1-secreting solid tumors including melanoma and neuroblastoma (Craddock et al., J. Immunother. 33(8):780-8, 2010, and Kershaw et al., Hum. Gene Ther. 13(16):1971-80, 2002) The chemokine receptor molecule can comprise a naturally occurring or recombinant chemokine receptor or a chemokine-binding fragment thereof. A chemokine receptor molecule suitable for expression in a modified cell of the disclosure (e.g., NK-cell) described herein include a CXC chemokine receptor (e.g., CXCR1, CXCR2, CXCR3, CXCR4, CXCR5, CXCR6, or CXCR7), a CC chemokine receptor (e.g., CCR1, CCR2, CCR3, CCR4, CCR5, CCR6, CCR7, CCR8, CCR9, CCR10, or CCR11), a CX3C chemokine receptor (e.g., CX3CR1), a XC chemokine receptor (e.g., XCR1), or a chemokine-binding fragment thereof. In one embodiment, the chemokine receptor molecule to be expressed with an engineered protein (e.g., chimeric protein) described herein is selected based on the chemokine(s) secreted by the tumor. In one embodiment, the engineered protein (e.g., chimeric protein)-expressing cell described herein further comprises, e.g., expresses, a CCR4 receptor. In an embodiment, the engineered protein (e.g., chimeric protein) described herein and the chemokine receptor molecule are on the same vector or are on two different vectors. In embodiments where the engineered protein (e.g., chimeric protein) described herein and the chemokine receptor molecule are on the same vector, the engineered protein (e.g., chimeric protein) and the chemokine receptor molecule are each under control of two different promoters or are under the control of the same promoter.

### Chimeric Antigen Receptors (CARs)

[0386] The present disclosure provides cells (e.g., immune cells, such as NK cells) engineered to comprise, (e.g., express) an engineered protein (e.g., chimeric protein), wherein the engineered protein (e.g., chimeric protein) comprises a) an extracellular domain, b) a transmembrane domain, c) an intracellular domain, and/or d) a linker, and which is further engineered to comprise (e.g., express) a chimeric antigen receptor (CAR). In some embodiments, the CAR acts in synergy with the one or more of the engineered proteins (e.g., chimeric proteins), and/or the one or more of the cytokines (e.g., membrane-bound cytokines) disclosed herein.

[0387] In some embodiments, the CARs are activating or stimulatory CARs, costimulatory CARs (see, e.g., International Patent Publication No. WO 2014/055668), and/or inhibitory CARs (iCARs, see, e.g., Fedorov et al., Sci. Transl. Med. 5(215): 215ra172, 2013). The CARs generally include an extracellular domain comprising an antigen (or ligand)-binding domain linked to one or more intracellular domains, e.g., via linkers and/or transmembrane domain(s). Such molecules typically mimic or approximate a signal through a natural antigen receptor, a signal through such a receptor in combination with a costimulatory receptor, and/or a signal through a costimulatory receptor alone. For example, once an antigen is recognized by the antigen-binding domain, the intracellular domain transmits an activation signal to the immune cell, e.g., NK cell, that induces the cell to destroy a targeted tumor cell.

[0388] In some embodiments, the CAR comprises (a) an antigen-binding domain; (b) a linker, (c) a transmembrane domain; and (d) at least one intracellular domain (e.g., comprising a stimulatory domain). In some embodiments, the CAR comprises (a) an antigen-binding domain; (b) a linker derived from one or more of CD8a (also referred to herein as CD8α), IgG1, IgG4, or CD28; (c) a transmembrane domain derived from one or more of CD27, CD28, CD8a, DAP10, DAP12, or NKG2D; and (d) at least one (e.g., one, two, three or more) intracellular domain derived from one or more of CD28, DAP10, DAP12, CD27, 4-1BB, 2B4, OX40, CD3zeta or FCER1G.

[0389] In certain embodiments of the CAR, the antigen-specific portion of the receptor comprises a tumor-associated antigen- or a pathogen-specific antigen-binding domain. Antigens include carbohydrate antigens recognized by pattern-recognition receptors, such as Dectin-1. A tumor associated antigen may be of any kind so long as it is expressed or present on the cell surface of tumor cells. Exemplary embodiments of tumor-associated antigens include, but are not limited to, CD70. In some embodiments, the antigen-specific portion of the CAR binds to CD70.

[0390] The antigen-binding domain of the CAR can comprise a fragment of the VH and VL chains of a single-chain variable fragment (scFv) that specifically binds CD70 polypeptide such as those described in U.S. Patent Application Publication Nos. 2018/0230224A1, 2019/0233528A1, and 2019/0233529A1; U.S. Pat. Nos. 8,124,738, 8,067,546, 8,562,987, 9,428,585, 9,701,752, 7,662,387, 8,535,678, 8,609,104, 8,663,642, 9,345,785, 7,641,903, 8,337,838, 8,647,624, 9,051,372, and 7,491,390; and EP 1934261, EP 1871418, EP 1594542, EP 2100619, EP 2289559, EP 1799262, and EP 3583129 A1, each of which is incorporated herein by reference in its entirety. Exemplary CD70 antigen-binding domains include, but are not limited to, anti-CD70 antibodies reviewed in Starzer et al., ESMO Open 2020; 4:e000629. The fragment can also be any number of different antigen-binding domains of a human antigen-specific antibody. In some embodiments, the fragment is an antigen-specific scFv encoded by a sequence that is optimized for human codon usage for expression in human cells.

[0391] The arrangement of the antigen-binding domain of the CAR could be multimeric, such as a diabody or multimers. In some embodiments, the multimers can be formed by cross pairing of the variable portion of the light and heavy chains into a diabody.

[0392] In some embodiments, the antigen-binding domain of the CAR comprises an antibody or an antigen-binding fragment thereof. In some embodiments, the antigen-binding domain comprises a single chain antibody fragment (scFv) comprising a light chain variable domain (VL) and heavy chain variable domain (VH) of a target antigen specific monoclonal anti-CD70 antibody, optionally, joined by a flexible linker, such as a glycine-serine linker or a Whitlow linker. In some embodiments, the scFv is humanized. In some embodiments, the antigen-binding domain may comprise VH and VL that are directionally linked, for example, from N- to C-terminus, VH-linker-VL or VL-linker-VH.

[0393] In some embodiments, scFv affinity of the CAR for CD70 may be optimized to induce cytotoxicity of tumor cells that produce high levels of CD70 without inducing cytotoxicity of normal cell that express low or normal levels of CD70. Illustrative examples of such affinity tuning are provided in Caruso et al., Cancer Res. 75: 3505-18, 2015, and Liu et al., Cancer Res. 75: 3596-607, 2015.

[0394] Exemplary anti-CD70 scFvs include but are not limited to 2H5, 10B4, 8B5, 18E7, 69A7, h1F6_VHE_VLA, h1F6_VHH_VLA, h1F6_VHJ_VLA, h1F6_VHM_VLA, h1F6_VHE_VLD, c1F6, 1F6-1, and 2F2, and immunologically active and/or antigen-binding fragments thereof. Exemplary anti-CD70 scFvs include but are not limited to 8G1, 1C8, 6E9, 31H1, 63B2, 40E3, 42C3, 45F11, 64F9, 72C2, 2F10, 4F11, 10H10, 17G6, 65E11, P02B10, P07D03, P08A02, P08E02, P08F08, P08G02, P12B09, P12F02, P12G07, P13F04, P15D02, P16C05, 10A1, 10E2, 11A1, 11C1, 11D1, 11E1, 12A2, 12C4, 12C5, 12D3, 12D6, 12D7, 12F5, 12H4, 8C8, 8F7, 8F8, 9D8, 9E10, 9E5, 9F4, 9F8, 12C6, CD70-1, CD70-2, CD70-3, CD70-4, CD70-5, CD70-6, CD70-7, CD70-8, CD70-9, CD70-10, CD70-11, CD70-12, CD70-13, CD70-14, CD70-15, CD70-16, CD70-17, CD70-18, CD70-19, CD70-20, CD70-21, CD70-22, CD70-23, CD70-24, CD70-25, CD70-26, CD70-27, CD70-28, CD70-29, CD70-30, CD70-31, CD70-32, CD70-33, CD70-34, CD70-35, CD70-36, CD70-37, CD70-38, CD70-39, CD70-40, CD70-41, CD70-42, CD70-43, CD70-44, CD70-45, CD70-46, CD70-47, CD70-48, CD70-49, CD70-50, CD70-51, CD70-52, CD70-53, CD70-54, CD70-55, CD70-56, CD70-57, CD70-58, CD70-59, CD70-60, CD70-61, CD70-62, CD70-63, CD70-64, CD70-65, CD70-66, CD70-67, CD70-68, CD70-69, CD70-70, CD70-71, CD70-72, CD70-73, CD70-74, CD70-75, CD70-76, CD70-77, CD70-78, CD70-79, CD70-80, CD70-81, CD70-82, CD70-83, CD70-84, CD70-85, CD70-86, CD70-87, CD70-88, CD70-89, CD70-90, CD70-91, CD70-92, CD70-93, CD70-94, CD70-95, CD70-96, CD70-97, CD70-98, CD70-99, CD70-100, CD70-101, CD70-102, CD70-103, CD70-104, CD70-105, CD70-106, CD70-107, CD70-108, CD70-109, CD70-110, CD70-111, CD70-112, CD70-113, CD70-114, CD70-115, CD70-116, CD70-117, CD70-118, CD70-119, CD70-120, CD70-121, CD70-122, CD70-123, CD70-124, CD70-125, CD70-126, CD70-127, CD70-128, CD70-129, CD70-130, CD70-131, CD70-132, CD70-133, CD70-134, CD70-135, CD70-136, CD70-137, CD70-138, CD70-139, CD70-140, CD70-141, CD70-142, CD70-143, CD70-144, CD70-145, CD70-146, CD70-147, CD70-148, CD70-149, CD70-150, CD70-151, CD70-152, CD70-153, CD70-154, CD70-155, CD70-156, CD70-157, CD70-158, CD70-159, CD70-160, CD70-161, CD70-162, CD70-163, CD70-164, CD70-165, CD70-166, CD70-167, CD70-168, CD70-169, CD70-170, CD70-171, CD70-172, CD70-173, CD70-174, CD70-175, CD70-176, CD70-177, CD70-178, CD70-179, CD70-180, 1C2, 9D1, 8B12, 8C12, 9.00E+01, 5F4, 5B2, 6D5, 4D2, 9A1, 9G2, 9B2, 2.40E+04, 33D8, 24F2, 24B6, 19G10, 45B12, 45D9, 45F8, 45A12, 45B6, 57B6, 59D10, 27B3, 36A9, 53F1, 36D6, 53G1, 35G3, 53C1, 35F6, 36G2, 39D5, 42D12, 35C1, 41D12, 41H8, 35G2, 40F1, 53B1, 39C3, 53D1, 53H1, 53A2, ARGX-110, CTX-130, CTX-130, and SCAR70, and immunologically active and/or antigen-binding fragments thereof.

### Exemplary Anti-CD70 CAR Constructs

[0395] Disclosed herein are a chimeric antigen receptor (CAR), wherein the CAR comprises (a) a CD70 antigen-binding domain; (b) a linker derived from one or more of CD8a, IgG1, IgG4, or CD28; (c) a transmembrane domain derived from one or more of CD27, CD28, CD8a, DAP10, DAP12, or NKG2D; and (d) an intracellular domain derived from one or more of CD28, DAP10, DAP12, CD27, 4-1BB, 2B4, OX40, CD3zeta or FCER1G.

[0396] Table C provides exemplary anti-CD70 CAR constructs disclosed herein and the domains that they comprise.

TABLE C
Exemplary anti-CD70 CAR Constructs and Domains Thereof

| | Signaling | | | | | |
|---|---|---|---|---|---|---|
| ID | Peptide | ECD | Linker | TMD | ICD 1 | ICD 2 |
| CAT-70-001 | CD8a | 1F6 | CD8a | CD28 | CD28 | CD3z |
| CAT-70-002 | CD8a | 1F6 | CD8a | NKG2D | DAP10 | CD3z |
| CAT-70-003 | CD8a | 1F6 | CD8a | NKG2D | DAP12 | CD3z |
| CAT-70-004 | CD27 | CD27 | — | CD27 | CD27 | CD3z |
| CAT-70-005 | CD27 | CD27 | — | CD28 | CD28 | CD3z |
| CAT-70-006 | CD27 | CD27 | — | NKG2D | DAP10 | CD3z |
| CAT-70-007 | CD27 | CD27 | — | NKG2D | DAP12 | CD3z |
| CAT-CD70-119 | CD27 | CD27 | — | CD27 | 4-1BB | CD3z |
| CAT-CD70-122 | CD27 | CD27 | CD8a | CD8a | 4-1BB | CD3z |
| CAT-CD70-124 | CD27 | CD27 | — | CD27 | CD28 | CD3z |
| CAT-CD70-125 | CD27 | CD27 | CD8a | CD8a | CD28 | CD3z |
| CAT-CD70-127 | CD8a | 1F6 | CD8a | CD8a | 4-1BB | CD3z |
| CAT-CD70-130 | CD8a | 1F6 | IgG1 | CD28 | CD28 | CD3z |
| CAT-CD70-133 | CD8a | 1F6 | CD28 | CD28 | CD28 | CD3z |
| CAT-CD70-135 | CD8a | 1F6 | CD8a | CD8a | CD28 | CD3z |
| CAT-CD70-136 | CD27 | CD27 | — | CD27 | CD27 | DAP12 |
| CAT-CD70-137 | CD27 | CD27 | — | CD27 | CD27 | FCER1G |
| CAT-CD70-140 | CD27 | CD27 | — | DAP10 | DAP10 | CD3z |
| CAT-CD70-141 | CD27 | CD27 | — | DAP12 | DAP12 | CD3z |
| CAT-CD70-142 | CD27 | CD27 | — | DAP12 | DAP12 | — |
| CAT-CD70-143 | CD8a | 1F6 | IgG1 | CD28 | CD28 | — |
| CAT-CD70-144 | CD8a | 1F6 | CD8a | CD8a | 4-1BB | — |
| CAT-CD70-145 | CD8a | 1F6 | CD8a | CD8a | — | CD3z |
| CAT-CD70-146 | CD8a | 1F6 | CD8a | CD8a | 4-1BB | 4-1BB |
| CAT-CD70-147 | CD8a | 1F6 | CD8a | CD8a | 2B4 | CD3z |
| CAT-CD70-148 | CD8a | 1F6 | CD8a | CD8a | DAP10 | CD3z |
| CAT-CD70-149 | CD8a | 1F6 | CD8a | CD8a | DAP12 | CD3z |
| CAT-CD70-150 | CD8a | 1F6 | CD8a | CD8a | OX40 | CD3z |
| CAT-CD70-153 | CD8a | 1F6 | CD8a | NKG2D | 2B4 | CD3z |
| CAT-CD70-154 | CD8a | 1F6 | CD8a | DAP10 | DAP10 | CD3z |
| CAT-CD70-155 | CD8a | 1F6 | CD8a | DAP12 | DAP12 | CD3z |
| CAT-CD70-156 | CD8a | 1F6 | CD8a | DAP12 | DAP12 | — |
| CAT-CD70-157 | CD8a | 1F6 | CD8a | CD28 | CD28 | DAP12 |
| CAT-CD70-158 | CD8a | 1F6 | CD8a | CD8a | 4-1BB | DAP12 |
| CAT-CD70-159 | CD8a | 1F6 | CD8a | CD8a | OX40 | DAP12 |
| CAT-CD70-160 | CD8a | 1F6 | CD8a | CD8a | DAP10 | DAP12 |
| CAT-CD70-161 | CD8a | 1F6 | CD8a | CD28 | CD28 | FCER1G |
| CAT-CD70-162 | CD8a | 1F6 | CD8a | CD8a | 4-1BB | FCER1G |
| CAT-CD70-163 | CD8a | 1F6 | CD8a | CD8a | OX40 | FCER1G |
| CAT-CD70-164 | CD8a | 1F6 | CD8a | CD8a | DAP10 | FCER1G |

### Exemplary Combinations of an Engineered Protein, a CAR and a Membrane Bound Cytokine

[0397] Also provided herein are cells (e.g., immune cells, such as NK cells) engineered to comprise, (e.g., express) a chimeric protein comprising an extracellular domain, a transmembrane domain, and an intracellular domain, wherein the extracellular domain binds to TGF-β3, and wherein the intracellular domain comprises an intracellular domain, or a portion thereof, of a stimulatory polypeptide, and which is further engineered to comprise (e.g., express) a chimeric antigen receptor (CAR) and a cytokine provided herein (e.g., membrane-associated IL-15/IL-15Ra). In some embodiments, the CAR comprises a CD70 antigen-binding domain.

[0398] Also provided herein are cells (e.g., immune cells, such as NK cells) engineered to comprise, (e.g., express) a protein comprising an extracellular domain and a transmembrane domain, wherein the extracellular domain is capable of binding TGF-β, and wherein the chimeric protein lacks a fully functional intracellular domain, and which is further engineered to comprise (e.g., express) a chimeric antigen receptor (CAR) and a cytokine provided herein (e.g., membrane-associated IL-15/IL-15Ra). In some embodiments, the CAR comprises a CD70 antigen-binding domain.

[0399] Also provided herein are cells (e.g., immune cells, such as NK cells) engineered to comprise, (e.g., express) a protein comprising a dominant negative isoform of a TGF-BR1, wherein the dominant negative isoform of TGF-BR1 competes with a wild-type isoform of a TGF-BR1 for binding TGF-B, and which is further engineered to comprise (e.g., express) a chimeric antigen receptor (CAR) and a cytokine provided herein (e.g., membrane-associated IL-15/IL-15Ra). In some embodiments, the CAR comprises a CD70 antigen-binding domain.

[0400] Also provided herein are cells (e.g., immune cells, such as NK cells) engineered to comprise, (e.g., express) a protein comprising a dominant negative isoform of a TGF-BR2, wherein the dominant negative isoform of TGF-BR21 competes with a wild-type isoform of a TGF-BR2 for binding TGF-B, and which is further engineered to comprise (e.g., express) a chimeric antigen receptor (CAR) and a cytokine provided herein (e.g., membrane-associated IL-15/IL-15Ra). In some embodiments, the CAR comprises a CD70 antigen-binding domain.

### Antigens

[0401] Among the antigens targeted by the CAR are those expressed in the context of a disease, condition, or cell type to be targeted via the adoptive cell therapy. Among the diseases and conditions are proliferative, neoplastic, and malignant diseases and disorders, including cancers and tumors, including hematologic cancers, cancers of the immune system, such as lymphomas, leukemias, and/or myelomas, such as B, T, and myeloid leukemias, lymphomas, and multiple myelomas. In some embodiments, the antigen is selectively expressed or overexpressed on cells of the disease or condition, e.g., the tumor or pathogenic cells, as compared to normal or non-targeted cells or tissues. In other embodiments, the antigen is expressed on normal cells and/or is expressed on the engineered cells.

[0402] Any suitable antigen may find use in the present method. Exemplary antigens include, but are not limited to, antigenic molecules from infectious agents, glycosylated antigens, TnAntigens, auto-/self-antigens, tumor-/cancer-associated antigens, and tumor neoantigens (Linnemann et al., Nat. Med. 21(1): 81-5, 2015). In particular embodiments, the antigens can be selected from the group consisting of CD70, Her2, mesothelin, Ror, Muc16, L1Cam, Lewis Y, B7-H3, FOLR1, PSMA, PSCA, BCMA, GPRC5D, CD138, CS1, CD19, CD20, CD22, CD79a, CD79b, CD37, CXCR5, TGF-B, CD96, CD33, CD123, CLEC12a, ADGRE2, or LILRB2. In preferred embodiments, the antigen is a CD70 antigen. In particular aspects, the antigens for targeting by two or more extracellular domains include, but are not limited to TGF-B and CD33 (e.g., for AML), TGF-B and CD123 (e.g., for AML), TGF-B and CLL1 (e.g., for AML), TGF-B and CD96 (e.g., for AML); TGF-B and CD19 (e.g., for B cell malignancies); TGF-B and CD22 (e.g., for B cell malignancies); TGF-B and CD20 (e.g., for B cell malignancies); TGF-B and CD79a (e.g., for B cell malignancies); TGF-B and CD79b (e.g., for B cell malignancies); TGF-B and BCMA (e.g., for multiple myeloma); TGF-B and GPRC5D (e.g., for multiple myeloma); TGF-B and CD138 (e.g., for multiple myeloma); TGF-B and CD96 (e.g., for RCC); TGF-B and HAVCR1 (e.g., for RCC); TGF-B and EGFR (e.g., for RCC). The sequences for these antigens are known in the art, for example, CD33—NM_001772.4; CD123—NC_000023.11, CLL1—NM_138337.6; CD96—NM_198196.3; CD96—NM_198196.3; HAVCR1—NM_001173393.3; EGFR—NM_005228.5; CD19—NG_007275.1; CD22—NM_001771.4; CD20—NM_152866.3; CD79a—NM_001783.4; CD79b—NM_001039933.3; CD37—NM_001774.3; CXCR5—NM 001716.5; BCMA—NM_001192.3; GPRC5D NM 018654.1; and CD138—NM_001006946.1.

[0403] Tumor-associated antigens may be derived from prostate, breast, colorectal, lung, pancreatic, renal, mesothelioma, ovarian, or melanoma cancers. Exemplary tumor-associated antigens or tumor cell-derived antigens include MAGE 1, 3, and MAGE 4 (or other MAGE antigens such as those disclosed in International Patent Publication No. WO 99/40188); PRAME; BAGE; RAGE, Lage (also known as NY ESO 1); SAGE; HAGE or GAGE; Her2; mesothelin; Ror1; Muc16; L1Cam; Lewis Y; B7-H3; FOLR1; PSMA; and PSCA. These non-limiting examples of tumor antigens are expressed in a wide range of tumor types such as melanoma, lung carcinoma, sarcoma, and bladder carcinoma. See, e.g., U.S. Pat. No. 6,544,518. Prostate cancer tumor-associated antigens include, for example, prostate-specific membrane antigen (PSMA), prostate-specific antigen (PSA), prostatic acid phosphates, NKX3.1, and six-transmembrane epithelial antigen of the prostate (STEAP).

[0404] Other tumor associated antigens include Plu-1, HASH-1, HasH-2, Cripto, and Criptin. Additionally, a tumor antigen may be a self-peptide hormone, such as whole length gonadotrophin hormone releasing hormone (GnRH), a short 10 amino acid long peptide, useful in the treatment of many cancers.

[0405] Tumor antigens include tumor antigens derived from cancers that are characterized by tumor-associated antigen expression, such as HER-2/neu expression. Tumor-associated antigens of interest include lineage-specific tumor antigens such as the melanocyte-melanoma lineage antigens MART-1/Melan-A, gp100, gp75, mda-7, tyrosinase and tyrosinase-related protein. Illustrative tumor-associated antigens include, but are not limited to, tumor antigens derived from or comprising any one or more of, p53, Ras, c-Myc, cytoplasmic serine/threonine kinases (e.g., A-Raf, B-Raf, and C-Raf, cyclin-dependent kinases), MAGE-A1, MAGE-A2, MAGE-A3, MAGE-A4, MAGE-A6, MAGE-A10, MAGE-A12, MART-1, BAGE, DAM-6, -10, GAGE-1, -2, -8, GAGE-3, -4, -5, -6, -7B, NA88-A, MART-1, MCIR, gp100, PSA, PSM, tyrosinase, TRP-1, TRP-2, ART-4, CAMEL, CEA, Cyp-B, hTERT, hTRT, iCE, MUC1, MUC2, Phosphoinositide 3-kinases (PI3Ks), TRK receptors, PRAME, P15, RU1, RU2, SART-1, SART-3, Wilms' tumor antigen (WTI), AFP, catenin/m, Caspase-8/m, CEA, CDK-4/m, ELF2M, GnT-V, G250, HSP70-2M, HST-2, KIAA0205, MUM-1, MUM-2, MUM-3, Myosin/m, RAGE, SART-2, TRP-2/INT2, 707-AP, Annexin II, CDC27/m, TPI/mbcr-abl, BCR-ABL, interferon regulatory factor 4 (IRF4), ETV6/AML, LDLR/FUT, Pml/RAR, tumor-associated calcium signal transducer 1 (TACSTD1), TACSTD2, receptor tyrosine kinases (e.g., Epidermal Growth Factor receptor (EGFR) (in particular, EGFRvIII), platelet derived growth factor receptor (PDGFR), vascular endothelial growth factor receptor (VEGFR)), cytoplasmic tyrosine kinases (e.g., src-family, syk-ZAP70 family), integrin-linked kinase (ILK), signal transducers and activators of transcription STAT3, STATS, and STATE, hypoxia inducible factors (e.g., HIF-1 and HIF-2), Nuclear Factor-Kappa B (NF-B), Notch receptors (e.g., Notch1-4), c-Met, mammalian targets of rapamycin (mTOR), WNT, extracellular signal-regulated kinases (ERKs), and their regulatory subunits, PMSA, PR-3, MDM2, mesothelin, renal cell carcinoma-5T4, SM22-alpha, carbonic anhydrases I (CAI) and IX (CAIX) (also known as G250), STEAD, TEL/AML1, GD2, proteinase3, hTERT, sarcoma translocation breakpoints, EphA2, ML-IAP, EpCAM, ERG (TMPRSS2 ETS fusion gene), NA17, PAX3, ALK, androgen receptor, cyclin B 1, polysialic acid, MYCN, RhoC, GD3, fucosyl GM1, PSCA, sLe, PLAC1, GM3, BORIS, Tn, GLoboH, NY-BR-1, RGsS, SART3, STn, PAX5, OY-TES 1, sperm protein 17, LCK, HMWMAA, AKAP-4, SSX2, XAGE 1, B7H3, legumain, TIE2, Page4, MAD-CT-1, FAP, MAD-CT-2, fos related antigen 1, CBX2, CLDN6, SPANX, TPTE, ACTL8, ANKRD30A, CDKN2A, MAD2L1, CTAG1B, SUNC1, LRRN1 and idiotype.

[0406] Antigens may include epitopic regions or epitopic peptides derived from genes mutated in tumor cells or from genes transcribed at different levels in tumor cells compared to normal cells, such as telomerase enzyme, survivin, mesothelin, mutated ras, bcr/abl rearrangement, Her2/neu, mutated or wild-type p53, cytochrome P450 1B 1, and abnormally expressed intron sequences such as N-acetylglucosaminyltransferase-V; clonal rearrangements of immunoglobulin genes generating unique idiotypes in myeloma and B-cell lymphomas; tumor antigens that include epitopic regions or epitopic peptides derived from oncoviral processes, such as human papilloma virus proteins E6 and E7; Epstein bar virus protein LMP2; nonmutated oncofetal proteins with a tumor-selective expression, such as carcinoembryonic antigen and alpha-fetoprotein.

### Safety Switch Proteins

[0407] In some embodiments, the cells, e.g., immune cells, comprising an engineered protein (e.g., chimeric protein) described herein that have been infused into a mammalian subject, e.g., a human, can be ablated in order to regulate the effect of such cells, e.g., immune cells should toxicity arise from their use. The engineered protein (e.g., chimeric protein) of the cells, e.g., immune cells of the present disclosure may comprise one or more suicide genes or safety switch proteins (e.g., caspase-9, inducible FAS (iFAS), and inducible caspase-9 (icasp9)).

[0408] As used herein, the term “safety switch protein,” “suicide protein,” or “kill switch protein” refers to an engineered protein (e.g., chimeric protein) designed to prevent potential toxicity or otherwise adverse effects of a cell therapy. In some embodiments, the safety switch protein expression is conditionally controlled to address safety concerns for transplanted engineered cells that have permanently incorporated the gene encoding the safety switch protein into its genome. This conditional regulation could be variable and might include control through a small molecule-mediated post-translational activation and tissue-specific and/or temporal transcriptional regulation. The safety switch could mediate induction of apoptosis, inhibition of protein synthesis or DNA replication, growth arrest, transcriptional and post-transcriptional genetic regulation and/or antibody-mediated depletion. In some embodiments, the safety switch protein is activated by an exogenous molecule, e.g., a prodrug, that, when activated, triggers apoptosis and/or cell death of a therapeutic cell.

[0409] The term “suicide gene” or “kill switch gene” as used herein is defined as a gene which, upon administration of a prodrug, effects transition of a gene product to a compound which kills its host cell. Examples of suicide gene/prodrug combinations which may be used include, but are not limited to inducible caspase 9 (iCASP9) and rimiducid; RQR8 and rituximab; truncated version of EGFR variant III (EGFRv3) and cetuximab; herpes simplex virus-thymidine kinase (HSV-tk) and ganciclovir, acyclovir, or FIAU; oxidoreductase and cycloheximide; cytosine deaminase and 5-fluorocytosine; thymidine kinase thymidilate kinase (Tdk::Tmk) and AZT; and deoxycytidine kinase and cytosine arabinoside. The E. coli purine nucleoside phosphorylase, a suicide gene which converts the prodrug 6-methylpurine deoxyriboside to toxic purine 6-methylpurine. Other examples of suicide genes used with prodrug therapy are the E. coli cytosine deaminase gene and the HSV thymidine kinase gene.

[0410] Exemplary suicide genes include but are not limited to inducible caspase 9 (or caspase 3 or 7), CD20, CD52, EGFRt, or, thymidine kinase, cytosine deaminase, HER1 and any combination thereof. Further suicide genes known in the art that may be used in the present disclosure include purine nucleoside phosphorylase (PNP), cytochrome p450 enzymes (CYP), carboxypeptidases (CP), carboxylesterase (CE), nitroreductase (NTR), guanine ribosyltransferase (XGRTP), glycosidase enzymes, methionine-γ-lyase (MET), and thymidine phosphorylase (TP).

### Engineered Protein Expression Levels

[0411] The present disclosure provides a population of engineered cells, e.g., immune cells (e.g., NK cells), wherein a plurality of the engineered cells, e.g., immune cells (e.g., NK cells), of the population comprise an engineered protein (e.g., chimeric protein) disclosed herein. The present disclosure provides a composition comprising a population of NK cells, wherein a plurality of the NK cells of the population comprise a non-naturally occurring engineered protein (e.g., chimeric protein) comprising, consisting essentially of, or consisting of: a) an extracellular domain, b) a transmembrane domain, c) an intracellular domain, and/or d) a linker. In some embodiments, at least 5%, at least 10%, at least 15%, at least 20%, at least 25%, at least 30%, at least 35%, at least 40%, at least 45%, at least 50%, at least 55%, at least 60%, at least 65%, at least 70%, at least 75%, at least 80%, at least 85%, at least 90%, at least 95%, at least 96%, at least 97%, at least 98%, at least 99%, or 100% of the population comprise the engineered protein (e.g., chimeric protein). In some embodiments, the engineered protein (e.g., chimeric protein) is expressed at a copy number of at least 1, 2, 3, 4, 5, 6, 7, 8, 9, 10, 20, 30, 40, 50, 60, 70, 80, 90 or 100, 500, 1000, 5000, 10,000, 15,000, 20,000, 25,000, 30,000, 40,000, or 50,000 copies per cell. In some embodiments, a nucleic acid encoding an engineered protein (e.g., chimeric protein) is integrated into the genome of a cell at a copy number of at least 1, 2, 3, 4, 5, 6, 7, 8, 9, 10, 20, or 30 copies per cell.

[0412] In some embodiments, the cells, e.g., immune cells (e.g., NK cells), expressing an engineered protein (e.g., chimeric protein) are further engineered to express at least one cytokine. In some embodiments, the cells, e.g., immune cells (e.g., NK cells), expressing an engineered protein (e.g., chimeric protein) are further engineered to express a CAR.

### Assays

[0413] All of the engineered proteins (e.g., chimeric proteins) disclosed herein can be generated and tested for structural and/or functional efficacy without undue experimentation in view of the present disclosure and further in view of the common general knowledge available in the art.

[0414] In some embodiments, a population of genetically engineered NK cells as disclosed herein exhibit an NK cell function (e.g., effector function). In some embodiments, the population is cytotoxic, e.g., to cancer cells. In some embodiments, the population exhibits directed secretion of cytolytic granules or engagement of death domain-containing receptors. In some embodiments, the cytolytic granules comprise perforin and/or granzymes.

[0415] Routine experimentation and assays well-known in the art can be used to identify an NK cell function in terms of its degranulation (e.g., CD107a expression), activation (e.g., CD69 production), cytokine production (e.g., TNFalpha or IFN-gamma production), target cell line killing, and/or anti-tumor efficacy in models (e.g., mice). Illustrative assays for measuring NK cell cytotoxicity and CD107a (granule release) are provided in Li et al., Cell Stem Cell 23: 181-192, 2018; incorporated in its entirety herein by reference. In some embodiments, the population exhibits one or more NK cell effector functions at a level that is least 3-4 (e.g., at least 3, 4, 5, 6, 7, 8, 9, 10, 20, 30, 40, 50, 100, 150, 200, 250, 300, 400, 500, 1000, 2,500, 5,000, 10,000, 15,000, or 25,000)-fold higher than the functions exhibited by a population of NK cells not expressing an engineered protein (e.g., chimeric protein) provided herein.

[0416] Additional assays, specific to one or more stimulatory and/or inhibitory polypeptides disclosed herein, will be apparent to one of skill in the art. For example, TGF-β signal transduction is known to trigger Smad2/3 phosphorylation. Further, expression of a dominant negative isoform of a TGF beta receptor in an NK cell has been demonstrated to block Smad2/3 phosphorylation (Burga et al., Clinical Cancer Research, 25(14):4400-12, 2019; incorporated in its entirety herein by reference). Accordingly, the activity of a dominant negative isoform of a TGF beta receptor can be determined by measuring the inhibition of Smad2/3 phosphorylation in an immune cell, for example, by performing a phopho-flow assay, a luminex kit assay, or a Western blot assay (Burga et al., 2019). Further, TGF-B signal transduction is associated with a loss of expression of NKG2D and DNAM-1 on the surface of an NK cell. The expression of a dominant negative isoform of a TGF beta receptor in an NK cell has been demonstrated to block this loss of expression of NKG2D and DNAM-1 (Burga et al., 2019). Accordingly, the activity of a dominant negative isoform of a TGF beta receptor can be determined by measuring the expression of NKG2D and DNAM-1 on the surface of an NK cell, for example, by performing flow cytometry (Burga et al., 2019) or any other cell phenotyping assays known in the art. The expression of a dominant negative isoform of a TGF beta receptor in an NK cell has been demonstrated to prevent the TGF-B mediated reduction of NK cell cytotoxicity (Burga et al., 2019). Accordingly, the activity of a dominant negative isoform of a TGF beta receptor can be determined by measuring the NK cell cytotoxicity, for example, by performing a Cr-51 release assay with SHSY5Y cells (Burga et al., 2019) or any other NK cell cytotoxicity assay known in the art (Li et al., 2018).

[0417] Additional assays comprise the use of a bead-based or a cell-based system for identifying synergy among receptors on resting NK cells for the activation of natural cytotoxicity and cytokine secretion, as described by Bryceson et al., Blood 107(1):159-66, 2006. Target-cell lysis by IL-2-activated NK cells in a redirected, antibody-dependent cytotoxicity assay is triggered by a number of receptors. In contrast, cytotoxicity by resting NK cells is induced only by CD16, and not by NKp46, NKG2D, 2B4 (CD244), DNAM-1 (CD226), or CD2. Calcium flux in resting NK cells is induced with antibodies to CD16 and, to a weaker extent, antibodies to NKp46 and 2B4. Although NKp46 does not enhance CD16-mediated calcium flux, it synergizes with all other receptors. 2B4 synergizes with 3 other receptors, NKG2D and DNAM-1 each synergize with 2 other receptors, and CD2 synergizes with NKp46 only. Resting NK cells can be induced to secrete tumor necrosis factor alpha (TNF-alpha) and interferon gamma (IFN-gamma), and to kill target cells by engagement of specific, pair-wise combinations of receptors. Therefore, natural cytotoxicity by resting NK cells is induced only by mutual co-stimulation of non-activating receptors. The function of the engineered proteins (e.g., chimeric proteins) of the sink or dominant negative receptor modalities disclosed herein may be tested in expanded transduced NK cells, and assayed for an output signal of Smad2/3 phosphorylation, as described herein (Burga et al., 2019), or upstream signaling events, for example, Syk phosphorylation. Further, the function of the chimeric proteins of the signal inverter modality disclosed herein, may be tested in transfected reporter cell lines, and assayed for an output signal of a downstream pathway (e.g., NF-κB, AP-1, and/or NFAT activity) that can detect activity from diverse upstream signals.

### IV. Methods of Gene Delivery and Cell Modification

[0418] Cells, e.g., immune cells comprising an engineered protein (e.g., chimeric protein), a cytokine and/or a CAR, as disclosed herein can be prepared using numerous methods known to one of skill in the art. For example, in some embodiments, an engineered protein (e.g., chimeric protein) may be expressed in a cell, e.g., an immune cell by introducing a vector encoding the engineered protein (e.g., chimeric protein). One of skill in the art would be well-equipped to construct a vector through standard recombinant techniques (see, for example, Sambrook et al., Molecular Cloning: A Laboratory Manual, 3rd ed., Cold Spring Harbor Press, Cold Spring Harbor, N.Y., 2001 and Ausubel et al., Current Protocols in Molecular Biology, Greene Publishing Associates and John Wiley & Sons, N Y, 1994, both incorporated herein by reference) for the expression of the engineered proteins (e.g., chimeric proteins) of the present disclosure. Vectors include but are not limited to, plasmids, cosmids, viruses (bacteriophage, animal viruses, and plant viruses), and artificial chromosomes (e.g., YACs), such as retroviral vectors (e.g., derived from Moloney murine leukemia virus vectors (MoMLV), MSCV, SFFV, MPSV, SNV., etc), lentiviral vectors (e.g., derived from HIV-1, HIV-2, SIV, BIV, FIV., etc.), adenoviral (Ad) vectors including replication competent, replication deficient and gutless forms thereof, adeno-associated viral (AAV) vectors, simian virus 40 (SV-40) vectors, bovine papilloma virus vectors, Epstein-Barr virus vectors, herpes virus vectors, vaccinia virus vectors, Harvey murine sarcoma virus vectors, murine mammary tumor virus vectors, Rous sarcoma virus vectors, parvovirus vectors, polio virus vectors, vesicular stomatitis virus vectors, maraba virus vectors, and group B adenovirus enadenotucirev vectors.

[0419] Numerous plasmid vectors are known in the art for inducing a nucleic acid encoding a protein. These include, but are not limited to, the vectors disclosed in U.S. Pat. Nos. 6,103,470, 7,598,364, 7,989,425, and 6,416,998, and 8,546,140, each of which is incorporated herein by reference.

[0420] An episomal gene delivery system can be a plasmid, an Epstein-Barr virus (EBV)-based episomal vector, a yeast-based vector, an adenovirus-based vector, a simian virus 40 (SV40)-based episomal vector, a bovine papilloma virus (BPV)-based vector, or a lentiviral vector. A viral gene delivery system can be an RNA-based or DNA-based viral vector.

[0421] In some embodiments, the cells, e.g., immune cells (e.g., NK cells) comprise one or more nucleic acids introduced via genetic engineering that encode one or more chimeric proteins, and genetically engineered products of such nucleic acids. In some embodiments, the nucleic acids are heterologous, i.e., normally not present in a cell or sample obtained from the cell, such as one obtained from another organism or cell, which for example, is not ordinarily found in the cell being engineered and/or an organism from which such cell is derived. In some embodiments, the nucleic acids are not naturally occurring, such as a nucleic acid not found in nature (e.g., chimeric).

### Viral Vectors

[0422] Viral vectors encoding an engineered protein (e.g., chimeric protein), a cytokine a CAR, and other proteins described herein are provided in certain aspects of the present disclosure.

[0423] In some embodiments of the methods of the disclosure, introducing a nucleic acid sequence and/or a genomic editing construct into a cell, e.g., an immune cell ex vivo, in vivo, in vitro or in situ comprises the use of a viral vector. In some embodiments, the viral vector is a non-integrating non-chromosomal vector. Exemplary non-integrating non-chromosomal vectors include, but are not limited to, adeno-associated virus (AAV), adenovirus, and herpes viruses. In some embodiments, the viral vector is an integrating chromosomal vector. Integrating chromosomal vectors include, but are not limited to, adeno-associated vectors (AAV), lentiviruses, and gamma-retroviruses.

[0424] Lentiviuses are complex retroviruses, which, in addition to the common retroviral genes gag, pol, and env, contain other genes with regulatory or structural function. Lentiviral vectors are well known in the art (see, for example, U.S. Pat. Nos. 6,013,516 and 5,994,136).

[0425] A retroviral vector may also be, e.g., a gammaretroviral vector. A gammaretroviral vector may include, e.g., a promoter, a packaging signal (ψ), a primer binding site (PBS), one or more (e.g., two) long terminal repeats (LTR), and a transgene of interest, e.g., a gene encoding an engineered protein (e.g., chimeric protein). A gammaretroviral vector may lack viral structural gens such as gag, pol, and env. Exemplary gammaretroviral vectors include Murine Leukemia Virus (MLV), Spleen-Focus Forming Virus (SFFV), and Myeloproliferative Sarcoma Virus (MPSV), and vectors derived therefrom. Other gammaretroviral vectors are described, e.g., in Tobias Maetzig et al., Viruses 3(6):677-713, 2011.

[0426] Recombinant lentiviral vectors are capable of infecting non-dividing cells and can be used for both in vivo and ex vivo gene transfer and expression of nucleic acid sequences. For example, recombinant lentivirus capable of infecting a non-dividing cell—wherein a suitable host cell is transfected with two or more vectors carrying the packaging functions, namely gag, pol and env, as well as rev and tat—is described in U.S. Pat. No. 5,994,136, incorporated herein by reference.

[0427] In certain embodiments of the methods of the disclosure, transgene delivery can occur by a combination of vectors. Exemplary but non-limiting vector combinations can include: viral plus non-viral vectors, more than one non-viral vector, or more than one viral vector. Exemplary but non-limiting vectors combinations can include: DNA-derived plus RNA-derived vectors, RNA plus reverse transcriptase, a transposon and a transposase, a non-viral vectors plus an endonuclease, and a viral vector plus an endonuclease.

[0428] In some embodiments of the methods of the disclosure, introducing a nucleic acid sequence and/or a genomic editing construct into a cell, e.g., an immune cell ex vivo, in vivo, in vitro or in situ comprises a combination of vectors. Exemplary, non-limiting vector combinations include: viral and non-viral vectors, a plurality of non-viral vectors, or a plurality of viral vectors. Exemplary but non-limiting vectors combinations include: a combination of a DNA-derived and an RNA-derived vector, a combination of an RNA and a reverse transcriptase, a combination of a transposon and a transposase, a combination of a non-viral vector and an endonuclease, and a combination of a viral vector and an endonuclease.

[0429] In some embodiments of the methods of the disclosure, genome modification comprising introducing a nucleic acid sequence and/or a genomic editing into a cell, e.g., an immune cell ex vivo, in vivo, in vitro or in situ stably integrates a nucleic acid sequence, transiently integrates a nucleic acid sequence, produces site-specific integration a nucleic acid sequence, or produces a biased integration of a nucleic acid sequence. In some embodiments, the nucleic acid sequence is a transgene. In some embodiments, the stable chromosomal integration can be a random integration, a site-specific integration, or a biased integration. In some embodiments, the site-specific integration can be non-assisted or assisted. In some embodiments, the assisted site-specific integration is co-delivered with a site-directed nuclease. In some embodiments, the site-directed nuclease comprises a transgene with 5′ and 3′ nucleotide sequence extensions that contain a percentage homology to upstream and downstream regions of the site of genomic integration. In some embodiments, the transgene with homologous nucleotide extensions enables genomic integration by homologous recombination, microhomology-mediated end joining, or nonhomologous end-joining. In some embodiments the site-specific integration occurs at a safe harbor site. Potential genomic safe harbors include, but are not limited to, intronic sequences of the human albumin gene, the adeno-associated virus site 1 (AAVS1), a naturally occurring site of integration of AAV virus on chromosome 19, the site of the chemokine (C-C motif) receptor 5 (CCR5) gene and the site of the human ortholog of the mouse Rosa26 locus.

[0430] In some embodiments, the site-specific transgene integration occurs at a site that disrupts expression of a target gene. In some embodiments, disruption of target gene expression occurs by site-specific integration at introns, exons, promoters, genetic elements, enhancers, suppressors, start codons, stop codons, and response elements. In some embodiments, exemplary target genes targeted by site-specific integration include but are not limited to CISH, SOCS, PD1, any immunosuppressive gene, and genes involved in allo-rejection.

[0431] In some embodiments, the site-specific transgene integration occurs at a site that results in enhanced expression of a target gene. In some embodiments, enhancement of target gene expression occurs by site-specific integration at introns, exons, promoters, genetic elements, enhancers, suppressors, start codons, stop codons, and response elements.

### Regulatory Elements

[0432] Expression cassettes included in vectors useful in the present disclosure in particular contain (in a 5′-to-3′ direction) a eukaryotic transcriptional promoter operably linked to a protein-coding sequence, splice signals including intervening sequences, and a transcriptional termination/polyadenylation sequence. A promoter used in the context of the present disclosure includes constitutive, inducible, and tissue-specific promoters.

[0433] The expression constructs provided herein comprise a promoter to drive expression of the engineered protein (e.g., chimeric protein), cytokine, CAR and/or other protein(s) provided herein. A promoter may or may not be used in conjunction with an “enhancer,” which refers to a cis-acting regulatory sequence involved in the transcriptional activation of a nucleic acid sequence.

[0434] The promoters employed may be constitutive, tissue-specific, inducible, and/or useful under the appropriate conditions to direct high-level expression of the introduced DNA segment, such as is advantageous in the large-scale production of recombinant proteins and/or peptides. The promoter may be heterologous or endogenous.

[0435] Additionally, any promoter/enhancer combination (as per, for example, the Eukaryotic Promoter Data Base EPDB, through world wide web at epd.isb-sib.ch/) could also be used to drive expression. Use of a T3, T7 or SP6 cytoplasmic expression system is another possible embodiment.

[0436] Non-limiting examples of promoters include early or late viral promoters, such as, SV40 early or late promoters, cytomegalovirus (CMV) immediate early promoters, Rous Sarcoma Virus (RSV) early promoters; eukaryotic cell promoters, such as, e.g., beta actin promoter, GADPH promoter, metallothionein promoter; and concatenated response element promoters, such as cyclic AMP response element promoters (ere), serum response element promoter (sre), phorbol ester promoter (TPA) and response element promoters (tre) near a minimal TATA box. It is also possible to use human growth hormone promoter sequences (e.g., the human growth hormone minimal promoter described at GENBANK, accession no. X05244, nucleotide 283-341) or a mouse mammary tumor promoter. In certain embodiments, the promoter is EF1alpha, MND, CMV IE, dectin-1, dectin-2, human CD11c, F4/80, SM22, RSV, SV40, Ad MLP, beta-actin, MHC class I or MHC class II promoter, however any other promoter that is useful to drive expression of the therapeutic gene is applicable to the practice of the present disclosure.

[0437] A specific initiation signal also may be used in the expression constructs provided in the present disclosure for efficient translation of coding sequences. These signals include the ATG initiation codon or adjacent sequences. Exogenous translational control signals, including the ATG initiation codon, may need to be provided. One of ordinary skill in the art would readily be capable of determining this and providing the necessary signals. The exogenous translational control signals and initiation codons can be either natural or synthetic.

[0438] In certain embodiments, internal ribosome entry sites (IRES) elements are used to create multigene, or polycistronic, messages. Additionally, certain 2A sequence elements could be used to create linked- or co-expression of genes in the constructs provided in the present disclosure. An exemplary cleavage sequence is the F2A (Foot-and-mouth disease virus 2A) or a “2A-like” sequence (e.g., Thosea asigna virus 2A; T2A) or a P2A (e.g., porcine teschovirus-1 2A).

[0439] In order to propagate a vector in a host cell, it may contain one or more origins of replication sites (often termed “ori”), for example, a nucleic acid sequence corresponding to oriP of EBV as described above or a genetically engineered oriP with a similar or elevated function in programming. Alternatively, a replication origin of other extra-chromosomally replicating virus as described above or an autonomously replicating sequence (ARS) can be employed.

### Selection Markers

[0440] In some embodiments, cells containing a construct of the present disclosure may be identified in vitro or in vivo by including a marker (e.g., a positive selection marker or a negative selection marker) in the expression vector. An example of a positive selection marker is a drug resistance marker.

### Other Methods of Nucleic Acid Delivery

[0441] In addition to viral delivery of the nucleic acids encoding the engineered protein (e.g., chimeric protein), cytokine, CAR, and/or other protein, the following are additional methods of recombinant gene delivery to a given cell, e.g., an immune cell (e.g., NK cell), and are thus considered in the present disclosure.

[0442] Introduction of a nucleic acid, such as DNA or RNA, into the cells, e.g., immune cells of the current disclosure may use any suitable methods for nucleic acid delivery for transformation of a cell, as described herein or as would be known to one of ordinary skill in the art. Such methods include, but are not limited to, direct delivery of DNA such as by ex vivo transfection, by injection, including microinjection); by electroporation; by calcium phosphate precipitation; by using DEAE-dextran followed by polyethylene glycol; by direct sonic loading; by liposome mediated transfection and receptor-mediated transfection; by microprojectile bombardment; by agitation with silicon carbide fibers; by Agrobacterium-mediated transformation; by desiccation/inhibition-mediated DNA uptake, and any combination of such methods. Through the application of techniques such as these, organelle(s), cell(s), tissue(s), or organism(s) may be stably or transiently transformed.

### Transposition Based Methods of Modification

[0443] Generally, the gene transfer system can include a transposon or a viral integration system.

[0444] In some embodiments, a transposon may be present in an expression vector. In some embodiments, the expression vector can be a DNA plasmid. In some embodiments, the expression vector may be a mini-circle vector. The term “mini-circle vector” as used herein can refer to small circular plasmid derivative that is free of most, if not all, prokaryotic vector parts (e.g., control sequences or non-functional sequences of prokaryotic origin).

[0445] Exemplary transposons include, but are not limited to, piggyBac, hyperactive piggyBac, Sleeping Beauty (SB), hyperactive Sleeping Beauty (SB100x), SB11, SB110, Tn7, TcBuster™, hyperactive TcBuster, Frog Prince, IS5, TnlO, Tn903, SPIN, hAT, Hermes, Hobo, AeBuster1, AeBuster2, AeBuster3, BtBuster1, BtBuster2, CfBuster1, CfBuster2, Tol2, mini-Tol2, Tc3, Mos1, MuA, Himar I, Helitron and engineered versions of transposase family enzymes (Zhang et al., PLoS Genet. 5:e1000689, 2009; Wilson et al., J. Microbiol. Methods 71:332-5, 2007). Exemplary transposons also include the transposons described in Arensburger et al., Genetics 188(1):45-57, 2011, or a SPACE INVADERS (SPIN) transposon (see, e.g., Pace et al., Proc. Natl. Acad Sci. U.S.A. 105(44):17023-17028, 2008). Alternatively, the gene transfer system can be integrated into the genome of a host cell using, for example, a retro-transposon, random plasmid integration, recombinase-mediated integration (e.g., using CRE recombinase), homologous recombination mediated integration, or non-homologous end joining mediated integration. More examples of transposition systems that can be used with certain embodiments of the compositions and methods provided herein include Staphylococcus aureus Tn552 (Colegio et al., J. Bacteriol. 183: 2384-8, 2001; Kirby et al., Mol. Microbiol. 43:173-86, 2002), Tyl (Devine & Boeke, Nucleic Acids Res. 22:3765-72, 1994, and WO 95/23875), Transposon Tn7 (Craig, Science 271:1512, 1996; Craig, Review in: Curr. Top. Microbiol. Immunol. 204:27-48, 1996), Tn/O and IS10 (Kleckner et al., Curr. Top. Microbiol. Immunol. 204:49-82, 1996), Mariner transposase (Lampe et al., EMBO J. 15:5470-9, 1996), Tel (Plasterk, Curr. Topics Microbiol. Immunol. 204:125-43, 1996), P Element (Gloor, Methods Mol. Biol. 260:97-114, 2004), Tn3 (Ichikawa & Ohtsubo, J. Biol. Chem. 265:18829-32, 1990), bacterial insertion sequences (Ohtsubo & Sekine, Curr. Top. Microbiol. Immunol. 204:1-26, 1996), retroviruses (Brown et al., Proc. Natl. Acad. Sci. U.S.A. 86:2525-9, 1989), and retrotransposon of yeast (Boeke & Corces, Ann. Rev. Microbiol. 43:403-34, 1989).

[0446] Exemplary TcBuster family transposons include, but are not limited to Ac-like (AAC46515), Ac (CAA29005), AeBuster1 (ABF20543), AeBuster2 (ABF20544), AmBuster1 (EFB22616), AmBuster2 (EFB25016), AmBuster3 (EFB20710), AmBuster4 (EFB22020), BtBuster1 (ABF22695), BtBuster2 (ABF22700), BtBuster3 (ABF22697), CfBuster1 (ABF22696), CfBuster2 (ABF22701), CfBuster3 (XP_854762), CfBuster4 (XP_545451), CsBuster (ABF20548), Daysleeper (CAB68118), DrBuster1 (ABF20549), DrBuster2 (ABF20550), EcBuster1 (XP_001504971), EcBuster3 (XP_001503499), EcBuster4 (XP_001504928), Hermes (AAC37217), hermit (LCU22467), Herves (AAS21248), hobo (A39652), Homer (AAD03082), hopper-we (AAL93203), HsBuster1 (AAF18454), HsBuster2 (ABF22698), HsBuster3 (NP_071373), HsBuster4 (AAS01734), IpTip100 (BAA36225), MamBuster2 (XP_001108973), MamBuster3 (XP_001084430), MamBuster3 (XP_001084430), MamBuster4 (XP_001101327), MmBuster2 (AAF18453), PtBuster2 (ABF22699), PtBuster3 (XP_001142453), PtBuster4 (XP_527300), Restless (CAA93759), RnBuster2 (NP_001102151), SpBuster1 (ABF20546), SpBuster2 (ABF20547), SsBuster4 (XP_001929194), Tam3 (CAA38906), TcBuster (ABF20545), Tol2 (BAA87039), tramp (CAA76545), XtBuster (ABF20551), ENSEMBL (sequences available on the World Wide Web at ensembl.org), PtBuster1 (ENSPTRG00000003364), REPBASE (sequences available on the World Wide Web at girinst.org), Ac-like2 (hAT-7_DR), Ac-like1 (hAT-6_DR), hAT-5_DR (hAT-5_DR), MiBuster1 (hAT-4_ML), Myotis-hAT1 (Myotis-hAT1), SPIN_Et (SPIN_Et), SPIN_M1 (SPIN_M1), SPIN-Og (SPIN-Og), TEFam (sequences available on the World Wide Web at tefam.biochem.vt.edu), AeHermes1 (TF0013337), AeBuster3 (TF001186), AeBuster4 (TF001187), AeBuster5 (TF001188), AeBuster7 (TF001336), AeHermes2 (TF0013338), AeTip100-2 (TF000910), Cx-Kink2 (TF001637), Cx-Kink3 (TF001638), Cx-Kink4 (TF001639), Cx-Kink5 (TF001640), Cx-Kink7 (TF001636), Cx-Kink8 (TF001635).

[0447] Compositions and methods of the disclosure may comprise a TcBuster transposon and/or a TcBuster transposase. Compositions and methods of the disclosure may comprise a TcBuster transposon and/or a hyperactive TcBuster transposase. A hyperactive TcBuster transposase demonstrates an increased excision and/or increased insertion frequency when compared to an excision and/or insertion frequency of a wild type TcBuster transposase and/or increased transposition frequency when compared to a transposition frequency of a wild type TcBuster transposase. In some embodiments, a TcBuster transposase may comprise any of the mutations disclosed in WO 2019/246486, which is incorporated herein by reference in its entirety. In some embodiments of the compositions and methods of the disclosure, a wild type TcBuster transposase comprises or consists of the amino acid sequence of SEQ ID NO: 514. In some embodiments of the compositions and methods of the disclosure, a TcBuster transposase comprises or consists of a sequence having at least 20%, at least 25%, at least 30%, at least 35%, at least 40%, at least 45%, at least 50%, at least 55%, at least 60%, at least 65%, at least 70%, at least 75%, at least 80%, at least 85%, at least 90%, at least 95%, at least 97%, at least 99%, or any percentage identity in between to a wild type TcBuster transposase comprising or consisting of the amino acid sequence of SEQ ID NO: 515. In some embodiments of the compositions and methods of the disclosure, a wild type TcBuster transposase is encoded by a nucleic acid sequence comprising or consisting of SEQ ID NO: 516. In some embodiments of the compositions and methods of the disclosure, a TcBuster Transposase comprises or consists of a sequence having at least 20%, at least 25%, at least 30%, at least 35%, at least 40%, at least 45%, at least 50%, at least 55%, at least 60%, at least 65%, at least 70%, at least 75%, at least 80%, at least 85%, at least 90%, at least 95%, at least 97%, at least 99% or any percentage identity in between to a wild type TcBuster transposase encoded by a nucleic acid sequence comprising or consisting of SEQ ID NO: 517.

[0448] In some embodiments, an engineered cell (e.g., NK cell) produced by transposition-based methods may comprise sequences flanking the nucleotide sequence incorporated into the cell's genome by transposition. Illustrative examples of such flanking sequences (also known as excision footprints) are provided in Woodard et al., PLoS ONE 7(11): e42666, 2012.

### Other Methods of Modification

[0449] In some embodiments of the methods of the disclosure, a modified cell, e.g., immune cell, of the disclosure may be produced by introducing a transgene into a cell, e.g., an immune cell of the disclosure. The introducing step may comprise delivery of a nucleic acid sequence and/or a genomic editing construct via a non-transposition delivery system.

[0450] In some embodiments of the methods of the disclosure, introducing a nucleic acid sequence and/or a genomic editing into a cell, e.g., an immune cell ex vivo, in vivo, in vitro or in situ, comprises one or more of topical delivery, adsorption, absorption, electroporation, spin-fection, co-culture, transfection, mechanical delivery, sonic delivery, vibrational delivery, magnetofection, or by nanoparticle-mediated delivery. In some embodiments of the methods of the disclosure, introducing a nucleic acid sequence and/or a genomic editing construct into a cell, e.g., an immune cell ex vivo, in vivo, in vitro or in situ, comprises liposomal transfection, calcium phosphate transfection, fugene transfection, or dendrimer-mediated transfection. In some embodiments of the methods of the disclosure, introducing a nucleic acid sequence and/or a genomic editing construct into a cell, e.g., an immune cell ex vivo, in vivo, in vitro or in situ, by mechanical transfection comprises cell squeezing, cell bombardment, or gene gun techniques. In some embodiments of the methods of the disclosure, introducing a nucleic acid sequence and/or a genomic editing construct into a cell, e.g., an immune cell ex vivo, in vivo, in vitro or in situ, by nanoparticle-mediated transfection comprises liposomal delivery, delivery by micelles, or delivery by polymerosomes.

[0451] In some embodiments of the methods of the disclosure, introducing a nucleic acid sequence and/or a genomic editing construct into a cell, e.g., an immune cell ex vivo, in vivo, in vitro or in situ, comprises a non-viral vector. In some embodiments, the non-viral vector comprises a nucleic acid. In some embodiments, the non-viral vector comprises plasmid DNA, linear double-stranded DNA (dsDNA), linear single-stranded DNA (ssDNA), DoggyBone™ DNA, nanoplasmids, minicircle DNA, single-stranded oligodeoxynucleotides (ssODN), DDNA oligonucleotides, single-stranded mRNA (ssRNA), or double-stranded mRNA (dsRNA). In some embodiments, the non-viral vector comprises a transposon of the disclosure.

[0452] In some embodiments of the methods of the disclosure, enzymes may be used to create strand breaks in the host genome to facilitate delivery or integration of the transgene. In some embodiments, enzymes create single-strand breaks or double-strand breaks. In some embodiments, examples of break-inducing enzymes include but are not limited to: transposases, integrases, endonucleases, meganucleases, megaTALs, CRISPR-Cas9, CRISPR-CasX, transcription activator-like effector nucleases (TALEN), or zinc finger nucleases (ZFN). Other editing or break-inducing enzymes may include, without limitation, nucleases such as Cas12a (includes MAD7), Cas12b, Cas12c, Cas13, and many more. In certain instance, the Cas12a nuclease is MAD7. In some embodiments, break-inducing enzymes can be delivered to the cell encoded in DNA, encoded in mRNA, as a protein, or as a nucleoprotein complex with a guide RNA (gRNA).

[0453] In some embodiments of the methods of the disclosure, the site-specific transgene integration is controlled by a vector-mediated integration site bias, by the chosen lentiviral vector and/or by the chosen gamma-retroviral vector. In some embodiments of the methods of the disclosure, the site-specific transgene integration site is a non-stable chromosomal insertion. In some embodiments, the integrated transgene may become silenced, removed, excised, or further modified.

[0454] In some embodiments of the methods of the disclosure, the genome modification is a non-stable integration of a transgene (e.g., transient non-chromosomal integration (e.g., epi-chromosomal or cytoplasmic), a semi-stable non chromosomal integration, a semi-persistent non-chromosomal insertion, or a non-stable chromosomal insertion). In some embodiments, the transient non-chromosomal insertion of a transgene does not integrate into a chromosome and the modified genetic material is not replicated during cell division.

[0455] In some embodiments of the methods of the disclosure, the genome modification is a semi-stable or persistent non-chromosomal integration of a transgene. In some embodiments, a DNA vector encodes a Scaffold/matrix attachment region (S-MAR) module that binds to nuclear matrix proteins for episomal retention of a non-viral vector allowing for autonomous replication in the nucleus of dividing cells.

[0456] In some embodiments of the methods of the disclosure, the modification to the genome by transgene insertion can occur via host cell-directed double-strand breakage repair (homology-directed repair) by homologous recombination (HR), microhomology-mediated end joining (MMFJ), nonhomologous end joining (NHFJ), transposase enzyme-mediated modification, integrase enzyme-mediated modification, endonuclease enzyme-mediated modification, or recombinant enzyme-mediated modification.

### Nanoparticle Delivery

[0457] In some embodiments intracellular delivery of gene editing tools is enabled by complexing with poly(histidine)-based micelles, e.g., comprising triblock copolymers made of a hydrophilic block, a hydrophobic block, and a charged block. In some embodiments, the hydrophilic block may be poly(ethylene oxide) (PEO), and the charged block may be poly(L-histidine). An example tri-block copolymer that may be used in various embodiments is a PEO-b-PLA-b-PHIS, with variable numbers of repeating units in each block varying by design. Diblock copolymers that may be used as intermediates for making triblock copolymers of the micelles may have hydrophilic biocompatible poly(ethylene oxide) (PEO), which is chemically synonymous with PEG, coupled to various hydrophobic aliphatic poly(anhydrides), poly(nucleic acids), poly(esters), poly(ortho esters), poly(peptides), poly(phosphazenes) and poly(saccharides), including but not limited by poly(lactide) (PLA), poly(glycolide) (PLGA), poly(lactic-co-glycolic acid) (PLGA), poly(ε-caprolactone) (PCL), and poly (trimethylene carbonate) (PTMC).

[0458] In certain embodiments of the methods of the disclosure, a cell with an ex vivo, in vivo, in vitro or in situ genomic modification can be a germline cell or a somatic cell. In certain embodiments the modified cell can be a human, non-human, mammalian, rat, mouse, or dog cell. In certain embodiments, the modified cell can be differentiated, undifferentiated, or immortalized. In certain embodiments, the modified undifferentiated cell can be a stem cell. In certain embodiments, the modified cell can be differentiated, undifferentiated, or immortalized. In certain embodiments, the modified undifferentiated cell can be an induced pluripotent stem cell. In certain embodiments, the modified cell can be a T cell, a hematopoietic stem cell, a natural killer cell, a macrophage, a dendritic cell, a monocyte, or a megakaryocyte. In certain embodiments, the modified cell can be modified while the cell is quiescent, in an activated state, resting, in interphase, in prophase, in metaphase, in anaphase, or in telophase. In certain embodiments, the modified cell can be fresh, cryopreserved, bulk, sorted into sub-populations, from whole blood, from leukapheresis, or from an immortalized cell line.

### Click Chemistry

[0459] Engineered cells, e.g., immune cells (e.g., NK cells), described herein can also be produced using coupling reagents to link an exogenous polypeptide (cytokine, targeting moiety etc.) to a cell with the use of click chemistry reactions. Coupling reagents can be used to couple an exogenous polypeptide to a cell, for example, when the exogenous polypeptide is a complex or difficult to express polypeptide, e.g., a polypeptide, e.g., a multimeric polypeptide; large polypeptide; polypeptide derivatized in vitro; an exogenous polypeptide that may have toxicity to, or which is not expressed efficiently in, the immune cells, e.g., NK cells.

[0460] The click chemistry approach was originally conceived as a method to rapidly generate complex substances by joining small subunits together in a modular fashion. (See, e.g., Kolb et al., Angew Chem. Int. Ed. 40:3004-31, 2004; Evans, Aust. J. Chem. 60:384-95, 2007.) Various forms of click chemistry reaction are known in the art, such as the Huisgen 1,3-dipolar cycloaddition copper catalyzed reaction (Tornoe et al., J. Organic Chem. 67:3057-64, 2002), which is often referred to as the “click reaction.” Other alternatives include cycloaddition reactions such as the Diels-Alder, nucleophilic substitution reactions (especially to small strained rings like epoxy and aziridine compounds), carbonyl chemistry formation of urea compounds and reactions involving carbon-carbon double bonds, such as alkynes in thiol-yne reactions. In some embodimnts, the click chemistry approach comprises copper catalyzed reaction, as described, e.g., in Rostovstev et al., 2002, Angew Chem Int Ed 41:2596, 2002; Tomoe et al., J. Org. Chem. 67:3057, 2002. In other embodimnts, the click chemistry approach comprises copper-free click reaction, as described, e.g., by Agard et al. (J. Am. Chem. Soc. 126:15046-47, 2004) and Ning et al. (Angew Chem. Int. Ed. 49:3065-68, 2010).

### Enzymatic Conjugation

[0461] In some embodiments, the exogenous polypeptide can be conjugated to the surface of a cell, e.g., an immune cell (e.g., an NK cell) by various chemical and enzymatic means, including but not limited to chemical conjugation with bifunctional cross-linking agents such as, e.g., an NHS ester-maleimide heterobifunctional crosslinker to connect a primary amine group with a reduced thiol group. These methods also include enzymatic strategies such as, e.g., transpeptidase reaction mediated by a sortase enzyme.

[0462] Sortase transpeptidation, also known as “sortase labeling” or “sortagging,” can be used for bioconjugation of two proteins. Methods compositions disclosed herein can use or include a sortase from any bacterial species or strain, e.g., a sortase A, a sortase B, a sortase C, a sortase D, a sortase E, a sortase F, or a sortase from a yet unidentified class of sortase enzymes (e.g., as described in Dramsi et al., Res. Microbiol. 156(3):289-97, 2005; Comfort and Clubb, Infect. Immun. 72(5):2710-22, 2004; and Spirig et al., Mol. Microbiol., 2011). The methods described herein can be used to evaluate candidate sortases. The amino acid sequences of many sortases and the nucleotide sequences that encode them are known to those of skill in the art and are disclosed in many of the references cited herein. The amino acid sequence of full-length, wild-type S. aureus Sortase A is SEQ ID NO: 518.

[0463] Mutant sortase molecules can be used to form engineered protein (e.g., chimeric protein) members, e.g., in situ on cells, e.g., immune cells, that comprise a sortase acceptor motif. An exemplary sortase mutant, which is efficient, and not dependent on non-physiological reaction conditions, is S. aureus sortase A mutant [P94R/E105K/E108Q/D160N/D165A/K190E/K196T]. It lacks the N-terminal 59 amino acids of S. aureus sortase A and includes mutations that render the enzyme calcium-independent and which make the enzyme faster (the amino acid residue number herein begins with residue the first residue at the N terminal end of non-truncated S. aureus sortase A). The primary amino acid sequence of this mutant is provided below. Mutations are in bold. The primary amino acid sequence of sortase A mutant [P94R/E105K/E108Q/D160N/D165A/K190E/K196T] comprises the amino acid sequence of SEQ ID NO: 519.

[0464] In some embodiments, the sortase recognition motif is LPXTG (SEQ ID NO: 520) or LPXTA (SEQ ID NO: 521) and the sortase acceptor motif is N-terminal donor sequence GGG, resulting in the sortase transfer signature that comprises LPXTGG (SEQ ID NO: 4) after the sortase-mediated reaction. The methods also include combination methods, such as e.g., sortase-mediated conjugation of click chemistry handles or “click handles” (an azide and an alkyne) on a protein and the cell, respectively, followed by a cyclo-addition reaction to chemically bond the antigen to the cell, see e.g., Neves et al., Bioconjugate Chemistry, 2013. Sortase-mediated modification of proteins is further described in PCT/US2014/037545, PCT/US2014/037554, and WO2016014553, each of which are incorporated by reference in their entireties herein. In some embodiments, a protein is modified by the conjugation of a sortase substrate comprising an amino acid, a peptide, a protein, a polynucleotide, a carbohydrate, a tag, a metal atom, a contrast agent, a catalyst, a non-polypeptide polymer, a recognition element, a small molecule, a lipid, a linker, a label, an epitope, an antigen, a therapeutic agent, a toxin, a radioisotope, a particle, or moiety comprising a reactive chemical group, e.g., a click chemistry handle.

[0465] If desired, a catalytic bond-forming polypeptide domain can be expressed on an immune cells, e.g., an NK cell, extracellularly. Many catalytic bond-forming polypeptides exist, including transpeptidases, sortases, and isopeptidases, including those derived from Spy0128 (e.g., SpyTag and SpyCatcher), a protein isolated from Streptococcuspyogenes. The components SpyTag and SpyCatcher can be interchanged such that a system in which molecule A is fused to SpyTag and molecule B is fused to SpyCatcher is functionally equivalent to a system in which molecule A is fused to SpyCatcher and molecule B is fused to SpyTag. For the purposes of this disclosure, when SpyTag and SpyCatcher are used, it is to be understood that the complementary molecule could be substituted in its place.

[0466] A catalytic bond-forming polypeptide, such as a SpyTag/SpyCatcher system, can be used to attach the exogenous polypeptide to the surface of a cell, e.g., a NK cell, to make an engineered cell, e.g., NK cell. The SpyTag polypeptide sequence can be expressed on the extracellular surface of the cell, e.g., NK cell. The SpyTag polypeptide can be, for example, fused to the N-terminus of a transmembrane protein, e.g., inserted in-frame at the extracellular terminus or in an extracellular loop of a multi-pass transmembrane protein, fused to a lipid-chain-anchored polypeptide, or fused to a peripheral membrane protein. The nucleic acid sequence encoding the SpyTag fusion can be expressed within an engineered cell, e.g., NK cell. An exogenous stimulatory polypeptide can be fused to SpyCatcher. The nucleic acid sequence encoding the SpyCatcher fusion can be expressed and secreted from the same cell, e.g., a NK cell, that expresses the SpyTag fusion. Alternatively, the nucleic acid sequence encoding the SpyCatcher fusion can be produced exogenously, for example in a bacterial, fungal, insect, mammalian, or cell-free production system. Upon reaction of the SpyTag and SpyCatcher polypeptides, a covalent bond will be formed that attaches the exogenous stimulatory polypeptide to the surface of the cell, e.g., NK cell to form an engineered cell, e.g., NK cell.

### Methods of Modified Cell Cryopreservation

[0467] In some embodiments of the present disclosure, the cells, e.g., immune cells described herein are modified at a point-of-care site. In some cases, the point-of-care site is at a hospital or at a facility (e.g., a medical facility) near a subject in need of treatment. The subject undergoes apheresis and peripheral blood mononuclear cells (PBMCs) or a sub population of PBMC can be enriched for example, by elutriation or Ficoll separation. Enriched PBMC or a subpopulation of PBMC can be cryopreserved in any appropriate cryopreservation solution prior to further processing. In one instance, the elutriation process is performed using a buffer solution containing human serum albumin. Immune cells, such as NK cells, can be isolated by selection methods described herein. In one instance, the selection method for NK cells includes beads specific for CD56 on NK cells. In one case, the beads can be paramagnetic beads. The harvested immune cells can be cryopreserved in any appropriate cryopreservation solution prior to modification. The immune cells can be thawed up to 24 hours, 36 hours, 48 hours, 72 hours, or 96 hours ahead of infusion. The thawed cells can be placed in cell culture buffer, for example in cell culture buffer (e.g., RPMI) supplemented with fetal bovine serum (FBS) or human serum AB or placed in a buffer that includes cytokines such as IL-2 and IL-21, prior to modification. In another aspect, the harvested immune cells can be modified immediately without the need for cryopreservation.

[0468] In one aspect, the population of genetically modified cells is cryopreserved prior to infusion into a subject. Genetically modified NK cells that are thawed following cryopreservation maintain their ability to bind to the negative signal. In some embodiments, at least 10%, at least 15%, at least 20%, at least 25%, at least 30%, at least 35%, at least 40%, at least 45%, at least 50%, at least 55%, at least 60%, at least 65%, at least 70%, at least 75%, at least 80%, at least 85%, at least 90%, at least 95%, at least 96%, at least 97%, at least 98% or at least 99% of the cryopreserved genetically modified cells maintain their ability to bind to the negative signal after thawing.

[0469] In one aspect, the population of genetically modified cells is immediately infused into a subject. In another aspect, the population of genetically modified NK cells is placed in a cytokine bath prior to infusion into a subject. In a further aspect, the population of genetically modified cells is cultured and/or stimulated for no more than 1, 2, 3, 4, 5, 6, 7, 14, 21, 28, 35, 42, 49, 56, 63, or 70 days.

[0470] In some embodiments, the modified cells, e.g., immune cells do not undergo a propagation and activation step. In some embodiments, the modified cells, e.g., immune cells do not undergo an incubation or culturing step (e.g., ex vivo propagation). In some embodiments, the immune cells are expanded in culture before administration to the subject. In certain cases, the modified immune cells are placed in a buffer that includes IL-2 and IL-21 prior to infusion. In other instances, the modified immune cells are placed or rested in cell culture buffer, for example in cell culture buffer (e.g., RPMI) supplemented with fetal bovine serum (FBS) prior to infusion. Prior to infusion, the modified immune cells can be harvested, washed, and formulated in saline buffer in preparation for infusion into the subject.

### Modification of Gene Expression

[0471] In some embodiments, the cells, e.g., immune cells of the present disclosure are modified to have altered expression of certain genes. In some embodiments, the immune cells of the present disclosure are modified to have altered expression, e.g., reduced expression, of certain genes such as glucocorticoid receptor, a TGF-beta receptor (e.g., TGF-BR2), CISH, PTEN, PD-1, SHP-1, Cbl-b, adenosine receptor A2A, adenosine receptor A2B, prostaglandin receptor EP2, prostaglandin receptorEP4, HIF-1alpha, SHP-2, c-Cbl, GRAIL, Itch, SHIP-1, SHIP-2, SOCS1, SOCS2, SOCS3, SOCS4, SOCS5, SOCS6, and/or SOC7. In some embodiments, the immune cells may be modified to express a dominant negative isoform of a TGF beta receptor I or II (e.g., as listed in Tables 6 and 7) to deplete endogenous TGF beta.

[0472] In some embodiments, SOCS family proteins encoded by the CISH gene are knocked out in immune cells to improve cytotoxicity, such as in NK cells. Exemplary SOCS family of proteins include, but are not limited to SOCS1, SOCS2, SOCS3, SOCS4, SOCS5, SOCS6, SOCS7 and CISH. This approach may be used alone or in combination with other checkpoint inhibitors to improve anti-tumor activity.

[0473] In some embodiments, the altered gene expression is carried out by effecting a disruption in the gene, such as a knock-out, insertion, missense, or frameshift mutation, such as biallelic frameshift mutation, deletion of all or part of the gene, e.g., one or more exon or portion therefore, and/or knock-in. For example, the altered gene expression can be effected by sequence-specific or targeted nucleases, including DNA-binding targeted nucleases such as zinc finger nucleases (ZFN), transcription activator-like effector nucleases (TALENs), and RNA-guided nucleases such as a CRISPR-associated nuclease (Cas), specifically designed to be targeted to the sequence of the gene or a portion thereof.

[0474] In some embodiments, the alteration of the expression, activity, and/or function of the gene is carried out by disrupting the gene. In some embodiments, the gene is modified so that its expression is reduced by at least 20⁰%, at least 30%, or at least 40%, generally at least 50%, at least 60%, at least 70%, at least 80%, at least 90%, or at least 95% as compared to the expression in the absence of the gene modification or in the absence of the components introduced to effect the modification.

[0475] In some embodiments, the alteration is transient or reversible, such that expression of the gene is restored at a later time. In other embodiments, the alteration is not reversible or transient, e.g., is permanent.

[0476] In some embodiments, gene alteration is carried out by induction of one or more double-stranded breaks and/or one or more single-stranded breaks in the gene, typically in a targeted manner. In some embodiments, the double-stranded or single-stranded breaks are made by a nuclease, e.g., an endonuclease, such as a gene-targeted nuclease (e.g., a DNA targeting molecule described herein). In some embodiments, the breaks are induced in the coding region of the gene, e.g., in an exon. For example, in some embodiments, the induction occurs near the N-terminal portion of the coding region, e.g., in the first exon, in the second exon, or in a subsequent exon.

[0477] In some embodiments, the double-stranded or single-stranded breaks undergo repair via a cellular repair process, such as by non-homologous end-joining (NHEJ) or homology-directed repair (HDR). In some embodiments, the repair process is error-prone and results in disruption of the gene, such as a frameshift mutation, e.g., biallelic frameshift mutation, which can result in complete knockout of the gene. For example, in some embodiments, the disruption comprises inducing a deletion, mutation, and/or insertion. In some embodiments, the disruption results in the presence of an early stop codon. In some embodiments, the presence of an insertion, deletion, translocation, frameshift mutation, and/or a premature stop codon results in disruption of the expression, activity, and/or function of the gene.

[0478] In some embodiments, gene alteration is achieved using antisense techniques, such as by RNA interference (RNAi), short interfering RNA (siRNA), short hairpin (shRNA), and/or ribozymes are used to selectively suppress or repress expression of the gene. In some aspects, the siRNA is comprised in a polycistronic construct.

[0479] In some embodiments, the DNA-targeting molecule includes a DNA-binding protein such as one or more zinc finger protein (ZFP) or transcription activator-like protein (TAL), fused to an effector protein such as an endonuclease. Examples include ZFNs, TALEs, and TALENs. Many gene-specific engineered zinc fingers are available commercially.

[0480] In some embodiments, the DNA-targeting molecule comprises a naturally occurring or engineered (non-naturally occurring) transcription activator-like protein (TAL) DNA binding domain, such as in a transcription activator-like protein effector (TALE) protein, see, e.g., U.S. Patent Publication No. 2011/0301073, incorporated by reference in its entirety herein. In some embodiments, TALEs may be targeted to any gene by design of TAL arrays with specificity to the target DNA sequence. In some embodiments, the TALEN is a fusion protein comprising a DNA-binding domain derived from a TALE and a nuclease catalytic domain to cleave a nucleic acid target sequence. Exemplary molecules are described, e.g., in U.S. Patent Publication Nos. US 2014/0120622 and 2013/0315884. In some embodiments the TALENs are introduced as trans genes encoded by one or more plasmid vectors.

[0481] In certain embodiments, the nuclease comprises a meganuclease (homing endonuclease) or a portion thereof that exhibits cleavage activity. Exemplary meganucleases include I-SceI, I-CeuI, PI-PspI, PI-Sce, I-SceIV, I-CsmI, I-PanI, I-SceII, I-PpoI, I-SceIII, I-CreI, I-TevI, I-TevII and I-TevIII. Their recognition sequences are known. See also U.S. Pat. Nos. 5,420,032; 6,833,252; Belfort et al., Nucleic Acids Res. 25: 3379-88, 1997; Dujon et al., Gene 82:115-8, 1989; Perler et al., Nucleic Acids Res. 22: 1125-7, 1994; Jasin, Trends Genel. 12: 224-8, 1996; Gimble et al., J. Mol. Biol. 263: 163-80, 1996; and Argast et al., J. Mol. Biol. 280: 345-53, 1998.

[0482] In some embodiments, the alteration is carried out using one or more DNA-binding nucleic acids, such as alteration via an RNA-guided endonuclease (RGEN). For example, the alteration can be carried out using clustered regularly interspaced short palindromic repeats (CRISPR) and CRISPR-associated (Cas) proteins. In general, “CRISPR system” refers collectively to transcripts and other elements involved in the expression of or directing the activity of CRISPR-associated (“Cas”) genes, including sequences encoding a Cas gene, a tracr (trans-activating CRISPR) sequence (e.g., tracrRNA or an active partial tracrRNA), a tracr-mate sequence (encompassing a “direct repeat” and a tracrRNA-processed partial direct repeat in the context of an endogenous CRISPR system), a guide sequence (also referred to as a “spacer” in the context of an endogenous CRISPR system), and/or other sequences and transcripts from a CRISPR locus. The CRISPR/Cas nuclease or CRISPR/Cas nuclease system can include a non-coding RNA molecule (guide) RNA, which sequence-specifically binds to DNA, and a Cas protein (e.g., Cas9), with nuclease functionality (e.g., two nuclease domains). One or more elements of a CRISPR system can derive from a type I, type II, or type III CRISPR system, e.g., derived from a particular organism comprising an endogenous CRISPR system, such as Streptococcus pyogenes.

[0483] In some embodiments, a Cas nuclease and gRNA (including a fusion of crRNA specific for the target sequence and fixed tracrRNA) are introduced into the cell. In general, target sites at the 5′ end of the gRNA target the Cas nuclease to the target site, e.g., the gene, using complementary base pairing. The target site may be selected based on its location immediately 5′ of a protospacer adjacent motif (PAM) sequence, such as typically NGG, or NAG. In this respect, the gRNA is targeted to the desired sequence by modifying the first 20, 19, 18, 17, 16, 15, 14, 14, 12, 11, or 10 nucleotides of the guide RNA to correspond to the target DNA sequence. Typically, “target sequence” refers to a sequence to which a guide sequence is designed to have complementarity, where hybridization between the target sequence and a guide sequence promotes the formation of a CRISPR complex.

[0484] The CRISPR system can induce double stranded breaks (DSBs) at the target site, followed by disruptions or alterations as discussed herein. In other embodiments, Cas9 variants, deemed “nickases,” are used to nick a single strand at the target site. Paired nickases can be used, e.g., to improve specificity, each directed by a pair of different gRNAs targeting sequences such that upon introduction of the nicks simultaneously, a 5′ overhang is introduced. In other embodiments, catalytically inactive Cas9 is fused to a heterologous effector domain such as a transcriptional repressor or activator, to affect gene expression.

[0485] The target sequence may comprise any polynucleotide, such as DNA or RNA polynucleotides. The target sequence may be located in the nucleus or cytoplasm of the cell, such as within an organelle of the cell. Generally, a sequence or template that may be used for recombination into the targeted locus comprising the target sequences is referred to as an “editing template” or “editing polynucleotide” or “editing sequence.” In some embodiments, an exogenous template polynucleotide may be referred to as an editing template.

[0486] The components of a CRISPR system can be implemented in any suitable manner, meaning that the components of such systems including the RNA-guided nuclease (e.g., Cas enzyme) and gRNA can be delivered, formulated, or administered in any suitable form to the cells. For example, the RNA-guided nuclease may be delivered to a cell complexed with a gRNA (e.g., as a ribonucleoprotein (RNP) complex), the RNA-guided nuclease may be delivered to a cell separate (e.g., uncomplexed) to a gRNA, the RNA-guided nuclease may be delivered to a cell as a polynucleotide (e.g., DNA or RNA) encoding the nuclease that is separate from a gRNA, or both the RNA-guided nuclease and the gRNA molecule may be delivered as polynucleotides encoding each component.

[0487] One or more vectors driving expression of one or more elements of the CRISPR system can be introduced into the cell such that expression of the elements of the CRISPR system direct formation of the CRISPR complex at one or more target sites. Components can also be delivered to cells as ribonucleoprotein complexes, proteins, DNA, and/or RNA. For example, a Cas enzyme, a guide sequence linked to a tracr-mate sequence, and a tracr sequence could each be operably linked to separate regulatory elements on separate vectors. Alternatively, two or more of the elements expressed from the same or different regulatory elements, may be combined in a single vector, with one or more additional vectors providing any components of the CRISPR system not included in the first vector. When multiple different guide sequences are used, a single expression construct may be used to target CRISPR activity to multiple different, corresponding target sequences within a cell.

[0488] A vector may comprise a regulatory element operably linked to an enzyme-coding sequence encoding the CRISPR enzyme, such as a Cas protein. Non-limiting examples of Cas proteins include Cas1, Cas1B, Cas2, Cas3, Cas4, Cas5, Cas6, Cas7, Cas8, Cas8a, Cas8b, Cas8c, Cas9 (also known as Csn1 and Csx12), Cas10, Cas10d, Cas12, Cas12a (Cpf1), Cas12b (C2c1), Cas12c (C2c3), Cas12d (CasY), Cas12e (CasX), Cas12f (Cas14, C2c10), Cas12g, Cas12h, Cas12i, Cas12k (C2c5), C2c4, C2c8, C2c9, Cas13, Cas13a (C2c2), Cas13b, Cas13c, Cas13d, CasX, Csy1, Csy2, Csy3, Cse1, Cse2, Csc1, Csc2, Csa5, Csn2, Csm2, Csm3, Csm4, Csm5, Csm6, Cmr1, Cmr3, Cmr4, Cmr5, Cmr6, Csb1, Csb2, Csb3, Csx17, Csx14, Csx10, Csx11, Csx16, CsaX, Csx3, Csx1, Csx15, Csf1, Csf2, Csf3, Csf4, MAD7, GSU0054, homologs thereof, or modified versions thereof. These enzymes are known; for example, the amino acid sequence of S. pyogenes Cas9 protein may be found in the SwissProt database under accession number Q99ZW2.

[0489] The CRISPR enzyme can be Cas9 (e.g., from S. pyogenes or S. pneumonia). The CRISPR enzyme can direct cleavage of one or both strands at the location of a target sequence, such as within the target sequence and/or within the complement of the target sequence. The vector can encode a CRISPR enzyme that is mutated with respect to a corresponding wild-type enzyme such that the mutated CRISPR enzyme lacks the ability to cleave one or both strands of a target polynucleotide containing a target sequence. For example, an aspartate-to-alanine substitution (D10A) in the RuvC1 catalytic domain of Cas9 from S. pyogenes converts Cas9 from a nuclease that cleaves both strands to a nickase (cleaves a single strand). In some embodiments, a Cas9 nickase may be used in combination with guide sequence(s), e.g., two guide sequences, which target respectively sense and antisense strands of the DNA target. This combination allows both strands to be nicked and used to induce NHEJ or HDR.

[0490] In some instances, the CRISPR enzyme can be Cas12a nuclease, such as MAD7. MAD7 is an engineered nuclease of the Class 2 type V-A CRISPR-Cas (Cas12a/Cpf1) family with a low level of homology to canonical Cas12a nucleases. MAD7 only requires a crRNA for gene editing and allows for specific targeting of AT rich regions of the genome. MAD7 cleaves DNA with a staggered cut as compared to S. pyogenes which has blunt cutting. The PAM sequence is YTTV, wherein Y indicates a C or T base, and V indicates A, C or G. The DNA cleavage sites for MAD7 relative to the target site are 19 bases after the YTTV PAM site on the sense strand and 23 bases after the complementary PAM site of the anti-sense strand.

[0491] In general, a guide sequence is any polynucleotide sequence having sufficient complementarity with a target polynucleotide sequence to hybridize with the target sequence and direct sequence-specific binding of the CRISPR complex to the target sequence. In some embodiments, the degree of complementarity between a guide sequence and its corresponding target sequence, when optimally aligned using a suitable alignment algorithm, is about or more than about 50%, 60%, 75%, 80%, 85%, 90%, 95%, 97.5%, 99%, or more.

[0492] Exemplary gRNA sequences for NR3CS (glucocorticoid receptor) include Ex3 NR3C1 sG1 5-TGC TGT TGA GGA GCT GGA-3 (SEQ ID NO: 522) and Ex3 NR3C1 sG2 5-AGC ACA CCA GGC AGA GTT-3 (SEQ ID NO: 523). Exemplary gRNA sequences for TGF-β receptor 2 include EX3 TGF-BR2 sG1 5-CGG CTG AGG AGC GGA AGA-3 (SEQ ID NO: 524) and EX3 TGF-BR2 sG2 5-TGG-AGG-TGA-GCA-ATC-CCC-3 (SEQ ID NO: 525). The T7 promoter, target sequence, and overlap sequence may have the sequence TTAATACGACTCACTATAGG (SEQ ID NO: 526)+target sequence+gttttagagctagaaatagc (SEQ ID NO: 527).

[0493] Optimal alignment may be determined with the use of any suitable algorithm for aligning sequences, non-limiting example of which include the Smith-Waterman algorithm, the Needleman-Wunsch algorithm, algorithms based on the Burrows-Wheeler Transform (e.g., the Burrows Wheeler Aligner), Clustal W, Clustal X, BLAT, Novoalign (Novocraft Technologies, ELAND (Illumina, San Diego, Calif.), SOAP (available at soap.genomics.org.cn), and Maq (available at maq.sourceforge.net).

[0494] The CRISPR enzyme may be part of a fusion protein comprising one or more heterologous protein domains. A CRISPR enzyme fusion protein may comprise any additional protein sequence, and optionally a linker sequence between any two domains. Examples of protein domains that may be fused to a CRISPR enzyme include, without limitation, epitope tags, reporter gene sequences, and protein domains having one or more of the following activities: methylase activity, demethylase activity, transcription activation activity, transcription repression activity, transcription release factor activity, histone modification activity, RNA cleavage activity and nucleic acid binding activity. Non-limiting examples of epitope tags include histidine (His) tags, V5 tags, FLAG tags, influenza hemagglutinin (HA) tags, Myc tags, VSV-G tags, and thioredoxin (Trx) tags. Examples of reporter genes include, but are not limited to, glutathione-5-transferase (GST), horseradish peroxidase (HRP), chloramphenicol acetyltransferase (CAT) beta galactosidase, beta-glucuronidase, luciferase, green fluorescent protein (GFP), HcRed, DsRed, cyan fluorescent protein (CFP), yellow fluorescent protein (YFP), and autofluorescent proteins including blue fluorescent protein (BFP). A CRISPR enzyme may be fused to a gene sequence encoding a protein or a fragment of a protein that bind DNA molecules or bind other cellular molecules, including but not limited to maltose binding protein (MBP), S-tag, Lex A DNA binding domain (DBD) fusions, GAL4A DNA binding domain fusions, and herpes simplex virus (HSV) BP16 protein fusions. Additional domains that may form part of a fusion protein comprising a CRISPR enzyme are described in US 2011/0059502, incorporated herein by reference.

### V. Methods of Use

[0495] In some embodiments, the present disclosure relates to methods of treating a disease or pathological condition in a subject, comprising administering to the subject an effective amount of the cells, e.g., immune cells of the present disclosure. In some embodiments, the present disclosure provides methods of modulating (e.g., increasing) an immune response in a subject in need thereof, comprising administering to the subject an effective amount of the immune cells of the present disclosure. In some embodiments, the present disclosure provides methods of treating a subject in need of an altered immune response, comprising administering an effective amount of the immune cells of the present disclosure. In some embodiments, the present disclosure provides methods of treating a subject in need of an increased immune response, comprising administering an effective amount of the immune cells of the present disclosure.

[0496] In some embodiments, the present disclosure provides methods for immunotherapy comprising administering an effective amount of the immune cells of the present disclosure. In some embodiments, a medical disease or disorder is treated by transfer of an immune cell population (e.g., an immune cell population provided herein) that elicits an immune response. In certain embodiments of the present disclosure, cancer or infection is treated by transfer of an immune cell population (e.g., an immune cell population provided herein) that elicits an immune response. Provided herein are methods for treating or delaying progression of cancer in an individual comprising administering to the individual an effective amount an antigen-specific cell therapy. The present methods may be applied for the treatment of immune disorders, solid cancers, hematologic cancers, and viral infections.

[0497] Tumors for which the present treatment methods are useful include any malignant cell type, such as those found in a solid tumor or a hematological tumor. Exemplary solid tumors can include, but are not limited to, a tumor of an organ selected from the group consisting of pancreas, colon, cecum, stomach, brain, head, neck, ovary, kidney, larynx, sarcoma, lung, bladder, melanoma, prostate, and breast. Exemplary hematological tumors include tumors of the bone marrow, T or B cell malignancies, leukemias, lymphomas, blastomas, myelomas, and the like. Further examples of cancers that may be treated using the methods provided herein include, but are not limited to, lung cancer (including small-cell lung cancer, non-small cell lung cancer, adenocarcinoma of the lung, and squamous carcinoma of the lung), cancer of the peritoneum, gastric or stomach cancer (including gastrointestinal cancer and gastrointestinal stromal cancer), pancreatic cancer, cervical cancer, ovarian cancer, liver cancer, bladder cancer, breast cancer, colon cancer, colorectal cancer, endometrial or uterine carcinoma, salivary gland carcinoma, kidney or renal cancer, prostate cancer, vulval cancer, thyroid cancer, various types of head and neck cancer, and melanoma.

[0498] The cancer may specifically be of the following histological type, though it is not limited to these: neoplasm, malignant; carcinoma; carcinoma, undifferentiated; giant and spindle cell carcinoma; small cell carcinoma; papillary carcinoma; squamous cell carcinoma; lymphoepithelial carcinoma; basal cell carcinoma; pilomatrix carcinoma; transitional cell carcinoma; papillary transitional cell carcinoma; adenocarcinoma; gastrinoma, malignant; cholangiocarcinoma; hepatocellular carcinoma; combined hepatocellular carcinoma and cholangiocarcinoma; trabecular adenocarcinoma; adenoid cystic carcinoma; adenocarcinoma in adenomatous polyp; adenocarcinoma, familial polyposis coli; solid carcinoma; carcinoid tumor, malignant; branchiolo-alveolar adenocarcinoma; papillary adenocarcinoma; chromophobe carcinoma; acidophil carcinoma; oxyphilic adenocarcinoma; basophil carcinoma; clear cell adenocarcinoma; granular cell carcinoma; follicular adenocarcinoma; papillary and follicular adenocarcinoma; nonencapsulating sclerosing carcinoma; adrenal cortical carcinoma; endometroid carcinoma; skin appendage carcinoma; apocrine adenocarcinoma; sebaceous adenocarcinoma; ceruminous adenocarcinoma; mucoepidermoid carcinoma; cystadenocarcinoma; papillary cystadenocarcinoma; papillary serous cystadenocarcinoma; mucinous cystadenocarcinoma; mucinous adenocarcinoma; signet ring cell carcinoma; infiltrating duct carcinoma; medullary carcinoma; lobular carcinoma; inflammatory carcinoma; Paget's disease, mammary; acinar cell carcinoma; adenosquamous carcinoma; adenocarcinoma w/squamous metaplasia; thymoma, malignant; ovarian stromal tumor, malignant; thecoma, malignant; granulosa cell tumor, malignant; androblastoma, malignant; Sertoli cell carcinoma; Leydig cell tumor, malignant; lipid cell tumor, malignant; paraganglioma, malignant; extra-mammary paraganglioma, malignant; pheochromocytoma; glomangiosarcoma; malignant melanoma; amelanotic melanoma; superficial spreading melanoma; lentigo malignant melanoma; acral lentiginous melanomas; nodular melanomas; malignant melanoma in giant pigmented nevus; epithelioid cell melanoma; blue nevus, malignant; sarcoma; fibrosarcoma; fibrous histiocytoma, malignant; myxosarcoma; liposarcoma; leiomyosarcoma; rhabdomyosarcoma; embryonal rhabdomyosarcoma; alveolar rhabdomyosarcoma; stromal sarcoma; mixed tumor, malignant; mullerian mixed tumor; nephroblastoma; hepatoblastoma; carcinosarcoma; mesenchymoma, malignant; brenner tumor, malignant; phyllodes tumor, malignant; synovial sarcoma: mesothelioma, malignant; dysgerminoma; embryonal carcinoma; teratoma, malignant; struma ovarii, malignant; choriocarcinoma; mesonephroma, malignant; hemangiosarcoma; hemangioendothelioma, malignant; Kaposi's sarcoma; hemangiopericytoma, malignant; lymphangiosarcoma; osteosarcoma; juxtacortical osteosarcoma; chondrosarcoma; chondroblastoma, malignant; mesenchymal chondrosarcoma; giant cell tumor of bone; Ewing's sarcoma; odontogenic tumor, malignant; ameloblastic odontosarcoma; ameloblastoma, malignant; ameloblastic fibrosarcoma; pinealoma, malignant; chordoma; glioma, malignant; ependymoma; astrocytoma; protoplasmic astrocytoma; fibrillary astrocytoma; astroblastoma; glioblastoma; oligodendroglioma; oligodendroblastoma; primitive neuroectodermal; cerebellar sarcoma; ganglioneuroblastoma; neuroblastoma; retinoblastoma; olfactory neurogenic tumor; meningioma, malignant; neurofibrosarcoma; neurilemmoma, malignant; granular cell tumor, malignant; malignant lymphoma; Hodgkin's disease; Hodgkin's; paragranuloma; malignant lymphoma, small lymphocytic; malignant lymphoma, large cell, diffuse; malignant lymphoma, follicular; mycosis fungoides; other specified non-Hodgkin's lymphomas; B-cell lymphoma; low grade/follicular non-Hodgkin's lymphoma (NHL); small lymphocytic (SL) NHL; intermediate grade/follicular NHL; intermediate grade diffuse NHL; high grade immunoblastic NHL; high grade lymphoblastic NHL; high grade small non-cleaved cell NHL; bulky disease NHL; mantle cell lymphoma; AIDS-related lymphoma; Waldenstrom's macroglobulinemia; malignant histiocytosis; multiple myeloma; mast cell sarcoma; immunoproliferative small intestinal disease; leukemia; lymphoid leukemia; plasma cell leukemia; erythroleukemia; lymphosarcoma cell leukemia; myeloid leukemia; basophilic leukemia; eosinophilic leukemia; monocytic leukemia; mast cell leukemia; megakaryoblastic leukemia; myeloid sarcoma; hairy cell leukemia; chronic lymphocytic leukemia (CLL); acute lymphoblastic leukemia (ALL); acute myeloid leukemia (AML; e.g., relapsed AML or refractory AML); myelodysplastic syndrome (MDS); chronic myeloblasts leukemia; diffuse large B-cell lymphoma (DLBCL); peripheral T-cell lymphoma (PTCL); or anaplastic large cell lymphoma (ALCL).

[0499] In certain embodiments of the present disclosure, cells, e.g., immune cells are delivered to an individual in need thereof, such as an individual that has cancer or an infection. The cells then enhance the individual's immune system to attack or directly attack the respective cancer or pathogenic cells. In some cases, the individual is provided with one or more doses of the cells, e.g., immune cells. In cases where the individual is provided with two or more doses of the cells, e.g., immune cells, the duration between the administrations should be sufficient to allow time for propagation in the individual, and in specific embodiments the duration between doses is 1, 2, 3, 4, 5, 6, 7, 8, 9, 10, 11, or 12 or more weeks.

[0500] In some embodiments, the subject can be administered nonmyeloablative lymphodepleting chemotherapy prior to the immune cell therapy. The nonmyeloablative lymphodepleting chemotherapy can be any suitable such therapy, which can be administered by any suitable route. The nonmyeloablative lymphodepleting chemotherapy can comprise, for example, the administration of cyclophosphamide and fludarabine. An exemplary route of administering cyclophosphamide and fludarabine is intravenously. Likewise, any suitable dose of cyclophosphamide and fludarabine can be administered. In particular embodiments, around 60 mg/kg of cyclophosphamide is administered for two days after which around 25 mg/m² fludarabine is administered for five days.

[0501] The nonmyeloablative lymphodepleting immunotherapy can comprise, for example, the administration of an anti-CD52 agent or anti-CD20 agent. In some embodiments, the lymphodepleting immunotherapy is an anti-CD52 antibody. In some embodiments, the anti-CD52 antibody is alemtuzumab. In some embodiments, the lymphodepleting immunotherapy is an anti-CD20 antibody. Exemplary anti-CD20 antibodies include, but are not limited to rituximab, ofatumumab, ocrelizumab, obinutuzumab, ibritumomab or iodine I-131 tositumomab. An exemplary route of administering anti-CD52 agent or anti-CD20 agent is intravenously. Likewise, any suitable dose of anti-CD52 agent or anti-agent can be administered.

[0502] In certain embodiments, a growth factor that promotes the growth and activation of the immune cells is administered to the subject either concomitantly with the immune cells or subsequently to the immune cells. The immune cell growth factor can be any suitable growth factor that promotes the growth and activation of the immune cells. Examples of suitable immune cell growth factors include IL-2, IL-7, IL-15, and IL-12, which can be used alone or in various combinations, such as IL-2 and IL-7, IL-2 and IL-15, IL-7 and IL-15, IL-2, IL-7 and IL-15, IL-12 and IL-7, IL-12 and IL-15, or IL-12 and IL2.

[0503] Therapeutically effective amounts of immune cells can be administered by a number of routes, including parenteral administration, for example, intravenous, intraperitoneal, intramuscular, intrasternal, or intraarticular injection, or infusion.

[0504] The therapeutically effective amount of immune cells for use in adoptive cell therapy is that amount that achieves a desired effect in a subject being treated. For instance, this can be the amount of immune cells necessary to inhibit advancement, or to cause regression of a disease, e.g., cancer, or which is capable of relieving symptoms caused by a disease, e.g., cancer. It can be the amount necessary to relieve symptoms associated with the disease, e.g., cancer.

[0505] The cell, e.g., immune cell, or a population of the cells can be administered in treatment regimens consistent with the disease, for example a single or a few doses over one to several weeks to ameliorate a disease state or periodic doses over an extended time to inhibit disease progression and prevent disease recurrence. The precise dose to be employed in the formulation will also depend on the route of administration, and the seriousness of the disease or disorder. The therapeutically effective amount of cells, e.g., immune cells, will be dependent on the subject being treated, the severity and type of the affliction, and the manner of administration. The exact amount of cells, e.g., immune cells, is readily determined by one of skill in the art based on the age, weight, sex, and physiological condition of the subject. Effective doses can be extrapolated from dose response curves derived from in vitro or animal model test systems.

[0506] The cells, e.g., immune cells, may be administered in combination with one or more other therapeutic agents for the treatment of the immune-mediated disorder. Combination therapies can include, but are not limited to, one or more anti-microbial agents (for example, antibiotics, anti-viral agents and anti-fungal agents), anti-tumor agents (for example, fluorouracil, methotrexate, paclitaxel, fludarabine, etoposide, doxorubicin, or vincristine), immune-depleting agents (for example, fludarabine, etoposide, doxorubicin, or vincristine), immunosuppressive agents (for example, azathioprine, or glucocorticoids, such as dexamethasone or prednisone), anti-inflammatory agents (for example, glucocorticoids such as hydrocortisone, dexamethasone or prednisone, or non-steroidal anti-inflammatory agents, such as acetyls alicylic acid, ibuprofen or naproxen sodium), cytokine antagonists (for example, anti-TNF and anti-IL-6), cytokines (for example, interleukin-10 or transforming growth factor-beta), hormones (for example, estrogen), or a vaccine. In addition, immunosuppressive or tolerogenic agents including but not limited to calcineurin inhibitors (e.g., cyclosporin and tacrolimus); mTOR inhibitors (e.g., rapamycin); mycophenolate mofetil, antibodies (e.g., recognizing CD3, CD4, CD40, CD154, CD45, IVIG, or B cells); chemotherapeutic agents (e.g., methotrexate, treosulfan, or busulfan); irradiation; or chemokines, interleukins or their inhibitors (e.g., BAFF, IL-2, anti-IL-2R, IL-4, or JAK kinase inhibitors) can be administered. Such additional pharmaceutical agents can be administered before, during, or after administration of the cells, e.g., immune cells, depending on the desired effect. This administration of the cells and the agent can be by the same route or by different routes, and either at the same site or at a different site.

### VI. Pharmaceutical Compositions

[0507] Also provided herein are pharmaceutical compositions and formulations comprising cells, e.g., immune cells (e.g., NK cells) and a pharmaceutically acceptable carrier.

[0508] In some embodiments, a pharmaceutical composition comprises a dose ranging from about 1×10⁵ immune cells (e.g., NK cells) to about 1×10⁹ immune cells (e.g., NK cells). In some embodiments, the dose is about 1×10⁵, 1×10⁶, 1×10⁷, 1×10⁸, or 1×10⁹ immune cells (e.g., NK cells). In some embodiments, a pharmaceutical composition comprises a dose ranging from about 5×10⁷ immune cells (e.g., NK cells) to about 10×10¹² immune cells (e.g., NK cells).

[0509] In some embodiments, a pharmaceutical composition is cryopreserved. In some embodiments, at least 10%, at least 15%, at least 20%, at least 25%, at least 30%, at least 35%, at least 40%, at least 45%, at least 50%, at least 55%, at least 60%, at least 65%, at least 70%, at least 75%, at least 80%, at least 85%, at least 90%, at least 91%, at least 92%, at least 93%, at least 94%, at least 95%, at least 96%, at least 97%, at least 98%, or at least 99% of the immune cells (e.g., NK cells) in the cryopreserved pharmaceutical composition specifically bind the cognate binding partner of the extracellular domain of the engineered protein (e.g., chimeric protein), e.g., human TGF-B, after thawing. Pharmaceutical compositions and formulations as described herein can be prepared by mixing the cells, e.g., immune cells (e.g., NK cells), with one or more optional pharmaceutically acceptable carriers (Remington's Pharmaceutical Sciences 22^{nd} edition, 2012), in the form of aqueous solutions. Pharmaceutically acceptable carriers are generally nontoxic to recipients at the dosages and concentrations employed, and include, but are not limited to: buffers such as phosphate, citrate, and other organic acids; antioxidants including ascorbic acid and methionine; preservatives (such as octadecyldimethylbenzyl ammonium chloride; hexamethonium chloride; benzalkonium chloride; benzethonium chloride); low molecular weight (less than about 10 residues) polypeptides; proteins, such as serum albumin or immunoglobulins; amino acids such as glycine, glutamine, asparagine, histidine, arginine, or lysine; monosaccharides, disaccharides, and other carbohydrates including glucose, mannose, or dextrins; and/or sugars such as sucrose, mannitol, trehalose or sorbitol.

### VII. Combination Therapies

[0510] In some embodiments, the compositions and methods of the present embodiments involve administration of a cell, e.g., an immune cell, or a population of the cells in combination with at least one additional therapy. The additional therapy may be radiation therapy, surgery (e.g., lumpectomy or a mastectomy), chemotherapy, gene therapy, DNA therapy, viral therapy, RNA therapy, immunotherapy, bone marrow transplantation, nanotherapy, monoclonal antibody therapy, or a combination of the foregoing. The additional therapy may be in the form of adjuvant or neoadjuvant therapy.

[0511] In some embodiments, the additional therapy is the administration of small molecule enzymatic inhibitor or anti-metastatic agent. In some embodiments, the additional therapy is the administration of side-effect limiting agents (e.g., agents intended to lessen the occurrence and/or severity of side effects of treatment, such as anti-nausea agents, etc.). In some embodiments, the additional therapy is a combination of radiation therapy and surgery. In some embodiments, the additional therapy is gamma irradiation. The additional therapy may be one or more of the chemotherapeutic agents known in the art.

[0512] An immune cell therapy may be administered before, during, after, or in various combinations relative to an additional cancer therapy, such as immune checkpoint therapy. The administrations may be in intervals ranging from concurrently to minutes to days to weeks. In some embodiments where the immune cell therapy is provided to a subject separately from an additional therapeutic agent, one would generally ensure that a significant period of time did not expire between the time of each delivery, such that the two compounds would still be able to exert an advantageously combined effect on the subject. In such instances, it is contemplated that one may provide a subject with the antibody therapy and the anti-cancer therapy within about 12 to 24 or 72 hours of each other and, more particularly, within about 6-12 hours of each other. In some situations, it may be desirable to extend the time period for treatment significantly where several days (2, 3, 4, 5, 6, or 7 days) to several weeks (1, 2, 3, 4, 5, 6, 7, or 8 weeks) lapse between respective administrations.

[0513] Administration of any compound or therapy of the present embodiments to a subject will follow general protocols for the administration of such compounds, taking into account the toxicity, if any, of the agents. Therefore, in some embodiments there is a step of monitoring toxicity that is attributable to combination therapy.

### Chemotherapy

[0514] A wide variety of chemotherapeutic agents may be used in accordance with the present embodiments. The term “chemotherapy” refers to the use of drugs to treat cancer. A “chemotherapeutic agent” is used to connote a compound or composition that is administered in the treatment of cancer. These agents or drugs are categorized by their mode of activity within a cell, for example, whether and at what stage they affect the cell cycle. Alternatively, an agent may be characterized based on its ability to directly cross-link DNA, to intercalate into DNA, or to induce chromosomal and mitotic aberrations by affecting nucleic acid synthesis.

[0515] Examples of chemotherapeutic agents include alkylating agents, such as thiotepa and cyclosphosphamide; alkyl sulfonates, such as busulfan, improsulfan, and piposulfan; aziridines, such as benzodopa, carboquone, meturedopa, and uredopa; ethylenimines and methylamelamines, including altretamine, triethylenemelamine, trietylenephosphoramide, triethiylenethiophosphoramide, and trimethylolomelamine; acetogenins (e.g., bullatacin and bullatacinone); a camptothecin (including the synthetic analogue topotecan); bryostatin; callystatin; CC-1065 (including its adozelesin, carzelesin and bizelesin synthetic analogues); cryptophycins (e.g., cryptophycin 1 and cryptophycin 8); dolastatin; duocarmycin (including the synthetic analogues KW-2189 and CB1-TM1); eleutherobin; pancratistatin; a sarcodictyin; spongistatin; nitrogen mustards, such as chlorambucil, chlornaphazine, cholophosphamide, estramustine, ifosfamide, mechlorethamine, mechlorethamine oxide hydrochloride, melphalan, novembichin, phenesterine, prednimustine, trofosfamide, and uracil mustard; nitrosureas, such as carmustine, chlorozotocin, fotemustine, lomustine, nimustine, and ranimnustine; antibiotics, such as the enediyne antibiotics (e.g., calicheamicin, e.g., calicheamicin gammall and calicheamicin omegall); dynemicin, including dynemicin A; bisphosphonates, such as clodronate; an esperamicin; as well as neocarzinostatin chromophore and related chromoprotein enediyne antiobiotic chromophores, aclacinomysins, actinomycin, authrarnycin, azaserine, bleomycins, cactinomycin, carabicin, carminomycin, carzinophilin, chromomycinis, dactinomycin, daunorubicin, detorubicin, 6-diazo-5-oxo-L-norleucine, doxorubicin (including morpholino-doxorubicin, cyanomorpholino-doxorubicin, 2-pyrrolino-doxorubicin and deoxy doxorubicin), epirubicin, esorubicin, idarubicin, marcellomycin, mitomycins, such as mitomycin C, mycophenolic acid, nogalarnycin, olivomycins, peplomycin, potfiromycin, puromycin, quelamycin, rodorubicin, streptonigrin, streptozocin, tubercidin, ubenimex, zinostatin, and zorubicin; anti-metabolites, such as methotrexate and 5-fluorouracil (5-FU); folic acid analogues, such as denopterin, pteropterin, and trimetrexate; purine analogs, such as fludarabine, 6-mercaptopurine, thiamiprine, and thioguanine; pyrimidine analogs, such as ancitabine, azacitidine, 6-azauridine, carmofur, cytarabine, dideoxyuridine, doxifluridine, enocitabine, and floxuridine; androgens, such as calusterone, dromostanolone propionate, epitiostanol, mepitiostane, and testolactone; anti-adrenals, such as mitotane and trilostane; folic acid replenisher, such as frolinic acid; aceglatone; aldophosphamide glycoside; aminolevulinic acid; eniluracil; amsacrine; bestrabucil; bisantrene; edatraxate; defofamine; demecolcine; diaziquone; elformithine; elliptinium acetate; an epothilone; etoglucid; gallium nitrate; hydroxyurea; lentinan; lonidainine; maytansinoids, such as maytansine and ansamitocins; mitoguazone; mitoxantrone; mopidanmol; nitraerine; pentostatin; phenamet; pirarubicin; losoxantrone; podophyllinic acid; 2-ethylhydrazide; procarbazine; PSKpolysaccharide complex; razoxane; rhizoxin; sizofiran; spirogermanium; tenuazonic acid; triaziquone; 2,2′,2″-trichlorotriethylamine; trichothecenes (e.g., T-2 toxin, verracurin A, roridin A and anguidine); urethan; vindesine; dacarbazine; mannomustine; mitobronitol; mitolactol; pipobroman; gacytosine; arabinoside (“Ara-C”); cyclophosphamide; taxoids, e.g., paclitaxel and docetaxel gemcitabine; 6-thioguanine; mercaptopurine; platinum coordination complexes, such as cisplatin, oxaliplatin, and carboplatin; vinblastine; platinum; etoposide (VP-16); ifosfamide; mitoxantrone; vincristine; vinorelbine; novantrone; teniposide; edatrexate; daunomycin; aminopterin; xeloda; ibandronate; irinotecan (e.g., CPT-11); topoisomerase inhibitor RFS 2000; difluorometlhylornithine (DMFO); retinoids, such as retinoic acid; capecitabine; carboplatin, procarbazine, plicomycin, gemcitabien, navelbine, farnesyl-protein transferase inhibitors, transplatinum, and pharmaceutically acceptable salts, acids, or derivatives of any of the above.

### Radiotherapy

[0516] In some embodiments, the additional therapy is radiotherapy including what are commonly known as γ-rays, X-rays, and/or the directed delivery of radioisotopes to tumor cells. Other forms of DNA damaging factors are also contemplated, such as microwaves, proton beam irradiation (U.S. Pat. Nos. 5,760,395 and 4,870,287), and UV-irradiation. Dosage ranges for X-rays range from daily doses of 50 to 200 roentgens for prolonged periods of time (3 to 4 weeks), to single doses of 2000 to 6000 roentgens. Dosage ranges for radioisotopes vary widely, and depend on the half-life of the isotope, the strength and type of radiation emitted, and the uptake by the neoplastic cells.

### Immunotherapy

[0517] The skilled artisan will understand that additional immunotherapies may be used in combination or in conjunction with methods of the embodiments. In the context of cancer treatment, immunotherapeutics, generally, rely on the use of immune effector cells and molecules to target and destroy cancer cells. Rituximab (RITUXAN®) is such an example. The immune effector may be, for example, an antibody specific for some marker on the surface of a tumor cell. The antibody alone may serve as an effector of therapy or it may recruit other cells to actually affect cell killing. The antibody also may be conjugated to a drug or toxin (chemotherapeutic, radionuclide, ricin A chain, cholera toxin, pertussis toxin, etc.) and serve as a targeting agent. Alternatively, the effector may be a lymphocyte carrying a surface molecule that interacts, either directly or indirectly, with a tumor cell target. Various effector cells include cytotoxic T cells and NK cells.

[0518] In some embodiments, the immunotherapy comprises administration of an antibody-drug conjugate (e.g., brentuximab vedotin and trastuzumab emtansine).

[0519] In one aspect of immunotherapy, the tumor cell must bear some marker that is amenable to targeting, i.e., is not present on the majority of other cells. In some embodiments, the marker is CD20, carcinoembryonic antigen, tyrosinase (p97), gp68, TAG-72, HMFG, Sialyl Lewis Antigen, MucA, MucB, PLAP, laminin receptor, erb B, or p155. In some embodiments, the immunotherapy includes administration of cytokines, such as IL-2, IL-4, IL-12, GM-CSF, gamma-IFN, chemokines, such as MIP-1, MCP-1, IL-8, and growth factors, such as FLT3 ligand.

[0520] In some embodiments, the additional immunotherapy for use in combination or in conjunction with the methods described herein is an immune adjuvant, e.g., Mycobacterium bovis, Plasmodium falciparum, dinitrochlorobenzene, and aromatic compounds (U.S. Pat. Nos. 5,801,005 and 5,739,169, Hui and Hashimoto, Infect. Immun. 66(11):5329-36, 1998; Christodoulides et al. Microbiology (Reading) 144 (Pt 11):3027-37, 1998); a cytokine therapy, e.g., interferons α, β, and γ, IL-1, GM-CSF, and TNF (Bukowski et al. Clin. Cancer Res. 4(10): 2337-47, 1998; Davidson et al. J. Immunother. 21(5): 389-9, 1998; Hellstrand et al. Acta Oncol., 37(4): 347-53, 1998); a gene therapy, e.g., TNF, IL-1, IL-2, and p53 (Qin et al. Proc. Nat'l. Acad. Sci. USA 95(24):14411-6, 1998; Austin-Ward and Villaseca, Rev. Med. Chil. 126(7): 838-45, 1998; U.S. Pat. Nos. 5,830,880 and 5,846,945); and a monoclonal antibody(ies), e.g., anti-CD20, anti-ganglioside GM2, and anti-p185 (Hollander Front Immunol. 3:3, 2012; Hanibuchi et al. Int. J. Cancer 78(4):480-5, 1998; U.S. Pat. No. 5,824,311).

[0521] In some embodiments, the immunotherapy may be an immune checkpoint inhibitor. Inhibitory immune checkpoints that may be targeted by immune checkpoint blockade include adenosine A2A receptor (A2AR), B7-H3 (also known as CD276), B and T lymphocyte attenuator (BTLA), cytotoxic T-lymphocyte-associated protein 4 (CTLA-4, also known as CD152), indoleamine 2,3-dioxygenase (IDO), killer-cell immunoglobulin (KIR), lymphocyte activation gene-3 (LAG3), programmed death 1 (PD-1), T-cell immunoglobulin domain and mucin domain 3 (TIM-3) and V-domain Ig suppressor of T cell activation (VISTA). In particular, the immune checkpoint inhibitors target the PD-1 axis and/or CTLA-4.

[0522] The immune checkpoint inhibitors may be drugs such as small molecules, recombinant forms of ligand or receptors, or, in particular, antibodies (e.g., pembrolizumab), such as human antibodies (e.g., WO 2015/016718; Pardoll, Nat. Rev. Cancer 12(4):252-64, 2012; both incorporated herein by reference). Known inhibitors of the immune checkpoint proteins or analogs thereof may be used, in particular chimerized, humanized or human forms of antibodies may be used.

[0523] In some embodiments, the PD-1 binding antagonist is a molecule that inhibits the binding of PD-1 to its ligand binding partners. In a specific aspect, the PD-1 ligand binding partners are PDL1 and/or PDL2. In another embodiment, a PDL1 binding antagonist is a molecule that inhibits the binding of PDL1 to its binding partners. In a specific aspect, PDL1 binding partners are PD-1 and/or B7-1. In another embodiment, the PDL2 binding antagonist is a molecule that inhibits the binding of PDL2 to its binding partners. In a specific aspect, a PDL2 binding partner is PD-1. The antagonist may be an antibody, an antigen-binding fragment thereof, an immunoadhesin, a fusion protein, or oligopeptide. Exemplary antibodies are described in U.S. Pat. Nos. 8,735,553, 8,354,509, and 8,008,449, all incorporated herein by reference. Other PD-1 axis antagonists for use in the methods provided herein are known in the art such as described in U.S. Patent Application Publication No. 2014/0294898, 2014/0022021, and 2011/0008369, all incorporated herein by reference.

[0524] In some embodiments, the PD-1 binding antagonist is an anti-PD-1 antibody (e.g., a human antibody, a humanized antibody, or a chimeric antibody). In some embodiments, the anti-PD-1 antibody is selected from the group consisting of AMP-224, nivolumab, pembrolizumab, and CT-011. In some embodiments, the PD-1 binding antagonist is an immunoadhesin (e.g., an immunoadhesin comprising an extracellular or PD-1 binding portion of PDL1 or PDL2 fused to a constant region (e.g., an Fc region of an immunoglobulin sequence)).

[0525] Another immune checkpoint that can be targeted in the methods provided herein is the cytotoxic T-lymphocyte-associated protein 4 (CTLA-4), also known as CD152. In some embodiments, the immune checkpoint inhibitor is an anti-CTLA-4 antibody (e.g., a human antibody, a humanized antibody, or a chimeric antibody), an antigen-binding fragment thereof, an immunoadhesin, a fusion protein, or oligopeptide. Anti-human-CTLA-4 antibodies (or VH and/or VL domains derived therefrom) suitable for use in the present methods include the anti-CTLA-4 antibodies disclosed in U.S. Pat. No. 8,119,129, WO 01/14424, WO 98/42752, WO 00/37504 (e.g., tremelimumab), U.S. Pat. No. 6,207,156; Hurwitz et al., Proc. Natl. Acad. Sci. U.S.A. 95(17):10067-10071, 1998; Camacho et al., Clin. Oncology 22(145): Abstract No. 2505, 2004 (antibody CP-675206); and Mokyr et al., Cancer Res. 58:5301-5304, 1998 (incorporated herein by reference). Antibodies that compete with any of these art-recognized antibodies for binding to CTLA-4 also can be used. For example, a humanized CTLA-4 antibody is described in International Patent Application No. WO 2001/014424, WO 2000/037504, and U.S. Pat. No. 8,017,114; all incorporated herein by reference.

[0526] In some embodiments, the anti-CTLA-4 antibody is ipilimumab (also known as 10D1, MDX-010, MDX-101, and Yervoy®) or antigen binding fragments and variants thereof (see, e.g., WO 2001/14424). In some embodiments, the antibody comprises the heavy and light chain CDRs or VRs of ipilimumab. Accordingly, in some embodiment, the antibody comprises the CDR1, CDR2, and CDR3 domains of the VH region of ipilimumab, and the CDR1, CDR2 and CDR3 domains of the VL region of ipilimumab. In some embodiments, the antibody competes for binding with and/or binds to the same epitope on CTLA-4 as the above-mentioned antibodies. In another embodiment, the antibody has at least about 90% variable region amino acid sequence identity with the above-mentioned antibodies (e.g., at least about 90%, at least about 95%, or at least about 99% variable region identity with ipilimumab).

[0527] Other molecules for modulating CTLA-4 include CTLA-4 ligands and receptors such as described in U.S. Pat. Nos. 5,844,905, 5,885,796, and WO 1995/001994 and WO 1998/042752; all incorporated herein by reference, and immunoadhesins such as described in U.S. Pat. No. 8,329,867, incorporated herein by reference.

[0528] Examples of immunotherapies for use in treatment of kidney cancer or renal cell cancer include, but are not limited to Afinitor (Everolimus), Afinitor Disperz (Everolimus), Aldesleukin, Avastin (Bevacizumab), Avelumab, Axitinib, Bavencio (Avelumab), Bevacizumab, Cabometyx (Cabozantinib-S-Malate), Cabozantinib-S-Malate, Everolimus, IL-2 (Aldesleukin), Inlyta (Axitinib), Interleukin-2 (Aldesleukin), Ipilimumab, Keytruda (Pembrolizumab), Lenvatinib Mesylate, Lenvima (Lenvatinib Mesylate), Mvasi (Bevacizumab), Nexavar (Sorafenib Tosylate), Nivolumab, Opdivo (Nivolumab), Pazopanib Hydrochloride, pembrolizumab, proleukin (Aldesleukin), Sorafenib Tosylate, Sunitinib Malate, Sutent (Sunitinib Malate), Temsirolimus, Torisel (Temsirolimus), Votrient (Pazopanib Hydrochloride), and Yervoy (Ipilimumab).

[0529] Examples of immunotherapies for use in treatment of Acute Myeloid Leukemia (AML) include, but are not limited to Azacytidine, Arsenic Trioxide, Cerubidine (Daunorubicin Hydrochloride), Cyclophosphamide, Cytarabine, Daunorubicin Hydrochloride, Daunorubicin Hydrochloride and Cytarabine Liposome, Daurismo (Glasdegib Maleate), Dexamethasone, Doxorubicin Hydrochloride, Enasidenib Mesylate, Gemtuzumab Ozogamicin, Gilteritinib Fumarate, Glasdegib Maleate, Idamycin PFS (Idarubicin Hydrochloride), Idarubicin Hydrochloride, Idhifa (Enasidenib Mesylate), Ivosidenib, Midostaurin, Mitoxantrone Hydrochloride, Mylotarg (Gemtuzumab Ozogamicin), Rubidomycin (Daunorubicin Hydrochloride), Rydapt (Midostaurin), Tabloid (Thioguanine), Thioguanine, Tibsovo (Ivosidenib), Trisenox (Arsenic Trioxide), Venclexta (Venetoclax), Venetoclax, Vincristine Sulfate, Vyxeos (Daunorubicin Hydrochloride and Cytarabine Liposome), and Xospata (Gilteritinib Fumarate).

### Surgery

[0530] In some embodiments, the additional therapy is surgery, including preventative, diagnostic or staging, curative, and palliative surgery and tumor resection. Curative surgery includes resection in which all or part of cancerous tissue is physically removed, excised, and/or destroyed and may be used in conjunction with other therapies, such as the treatment of the present embodiments, chemotherapy, radiotherapy, hormonal therapy, gene therapy, immunotherapy, and/or alternative therapies. Tumor resection refers to physical removal of at least part of a tumor. In addition to tumor resection, treatment by surgery includes laser surgery, cryosurgery, electrosurgery, and microscopically controlled surgery (Mohs' surgery).

[0531] Upon excision of part or all of cancerous cells, tissue, or tumor, a cavity may be formed in the body. Treatment may be accomplished by perfusion, direct injection, or local application of the area with an additional anti-cancer therapy. Such treatment may be repeated, for example, every 1, 2, 3, 4, 5, 6, or 7 days, or every 1, 2, 3, 4, and 5 weeks or every 1, 2, 3, 4, 5, 6, 7, 8, 9, 10, 11, or 12 months. These treatments may be of varying dosages as well.

### Other Agents

[0532] It is contemplated that other agents may be used in combination with certain aspects of the present embodiments to improve the therapeutic efficacy of treatment. These additional agents include agents that affect the upregulation of cell surface receptors and GAP junctions, cytostatic and differentiation agents, inhibitors of cell adhesion, agents that increase the sensitivity of the hyperproliferative cells to apoptotic inducers, or other biological agents. Increases in intercellular signaling by elevating the number of GAP junctions would increase the anti-hyperproliferative effects on the neighboring hyperproliferative cell population. In other embodiments, cytostatic or differentiation agents can be used in combination with certain aspects of the present embodiments to improve the anti-hyperproliferative efficacy of the treatments. Inhibitors of cell adhesion are contemplated to improve the efficacy of the present embodiments. Examples of cell adhesion inhibitors are focal adhesion kinase (FAKs) inhibitors and lovastatin. It is further contemplated that other agents that increase the sensitivity of a hyperproliferative cell to apoptosis, such as the antibody c225, could be used in combination with certain aspects of the present embodiments to improve the treatment efficacy.

### VIII. Dosage Regimens

[0533] In some embodiments, the cells, e.g., immune cells (e.g., NK cells) are modified by engineering/introducing an engineered protein (e.g., chimeric protein) (e.g., chimeric TGF-B receptor protein) into said cells and then infused into a subject. In some embodiments, the cells, e.g., immune cells are further modified by engineering/introducing a CAR and/or a cytokine (e.g., mbIL-15/IL-15Ra complex) into the cells, in addition to the engineered protein (e.g., chimeric protein), and then infused into the subject. In some embodiments, the cells are modified and then infused within about 0 days, within about 1 day, within about 2 days, within about 3 days, within about 4 days, within about 5 days, within about 6 days or within about 7 days into a subject.

[0534] In some embodiments, an amount of modified cells, e.g., immune cells, is administered to a subject in need thereof and the amount is determined based on the efficacy and the potential of inducing cytotoxicity. In another embodiment, the modified immune cells are engineered protein⁺ (e.g., chimeric protein⁺) and CD56⁺ cells.

[0535] In some embodiments, an amount of modified cells, e.g., immune cells, comprises about 10⁴ to about 10⁹ modified cells/kg. In some embodiments, an amount of modified cells, e.g., immune cells, comprises about 10⁴ to about 10⁵ modified cells/kg. In some embodiments, an amount of modified cells, e.g., immune cells, comprises about 10⁵ to about 10⁶ modified cells/kg. In some embodiments, an amount of modified cells, e.g., immune cells, comprises about 10⁶ to about 10⁷ modified cells/kg. In some embodiments, an amount of modified cells, e.g., immune cells, comprises about 10⁷ to about 10⁸ modified cells/kg. In some embodiments, an amount of modified cells, e.g., immune cells, comprises about 10⁸ to about 10⁹ modified cells/kg. In some embodiments, an amount of modified cells, e.g., cells comprises about 1×10⁶, about 2×10⁶, about 3×10⁶, about 4×10⁶, about 5×10⁶, about 6×10⁶, about 7×10⁶, about 8×10⁶, about 9×10⁶, about 1×10⁷, about 2×10⁷, about 3×10⁷, about 4×10⁷, about 5×10⁷, about 6×10⁷, about 7×10⁷, about 8×10⁷, about 9×10⁷, about 1×10⁸, about 2×10⁸, about 3×10⁸, about 4×10⁸, about 5×10⁸, about 6×10⁸, about 7×10⁸, about 8×10⁸, about 9×10⁸, or about 1×10⁹ modified cells/kg.

[0536] In some embodiments, the modified immune cells, e.g., immune cells are targeted to the cancer via regional delivery directly to the tumor tissue. For example, in ovarian or renal cancer, the modified cells, e.g., immune cells can be delivered intraperitoneally (IP) to the abdomen or peritoneal cavity. Such IP delivery can be performed via a port or pre-existing port placed for delivery of chemotherapy drugs. Other methods of regional delivery of modified cells, e.g., immune cells can include catheter infusion into resection cavity, ultrasound guided intratumoral injection, hepatic artery infusion or intrapleural delivery.

[0537] In some embodiments, the modified cells, e.g., immune cells are administered by intravenous (IV) administration. In some embodiments, a subject in need thereof, can begin therapy with a first dose of modified cells, e.g., immune cells delivered via IV followed by a second dose of modified cells, e.g., immune cells delivered via IV. In some embodiments, a subject in need thereof, can begin therapy with a first dose of modified cells, e.g., immune cells delivered via IP followed by a second dose of modified cells, e.g., immune cells delivered via IV. In a further embodiment, the second dose of modified cells, e.g., immune cells can be followed by subsequent doses which can be delivered via IV or IP.

### IX. Articles of Manufacture or Kits

[0538] An article of manufacture or a kit comprising engineered proteins (e.g., chimeric proteins), nucleic acids encoding said engineered proteins (e.g., chimeric proteins), and/or cells, e.g., immune cells of the present disclosure, is also provided herein. The article of manufacture or kit can further comprise a package insert comprising instructions for using the engineered proteins (e.g., chimeric proteins), nucleic acids, and/or cells, e.g., immune cells, to treat or delay progression of cancer in an individual or to enhance immune function of an individual having cancer. Any of the engineered proteins (e.g., chimeric proteins), nucleic acids and/or cells, e.g., immune cells described herein may be included in the article of manufacture or kits. Suitable containers include, for example, bottles, vials, bags, and syringes. The container may be formed from a variety of materials such as glass, plastic (such as polyvinyl chloride or poly olefin), or metal alloy (such as stainless steel or hastelloy). In some embodiments, the container holds the formulation and the label on, or associated with, the container may indicate directions for use. The article of manufacture or kit may further include other materials desirable from a commercial and user standpoint, including other buffers, diluents, filters, needles, syringes, and package inserts with instructions for use. In some embodiments, the article of manufacture further includes one or more of another agent (e.g., a chemotherapeutic agent, and anti-neoplastic agent). Suitable containers for the one or more agent include, for example, bottles, vials, bags, and syringes.

### EXAMPLES

### Example 1. Generation of a Chimeric Protein of the Signal Inverter Modality

[0539] DNA constructs are prepared for expression in immune cells, e.g., NK cells, as shown in Table 15 below:

TABLE 15
TGF-BR2 chimeric protein constructs of the signal inverter modality.

| | Extracellular | | Intracellular | SEQ |
|---|---|---|---|---|
| Signal Inverter | Domain | Transmembrane | Domain | ID |
| Chimeric Protein | (ECD) | Domain (TMD) | (ICD) | NO: |
| TGF-BR2-DAP12 | TGF-BR2 | TGF-BR2 | DAP12 | 528 |
| TGF-BR2-DAP12 | TGF-BR2 | DAP12 | DAP12 | 529 |
| TGF-BR2-DAP10 | TGF-BR2 | DAP10 | DAP10 | 530 |
| TGF-BR2-DAP10 | TGF-BR2 and | DAP10 | DAP10 | 531 |
| | DAP10 | | | |
| TGF-BR2-DAP10 | TGF-BR2 | TGF-BR2 | TGF-BR2 | 532 |
| | | | and DAP10 | |

[0540] The chimeric protein constructs described in Table 15 are cloned into the multiple cloning site of retroviral gene transfer vectors: pELNS or pES.12-6(g)ps under control of one of the following promoters: EF-1, EFS, MND, MSCV, CMV, PGK, mCAG or RPBSA. Retrovirus is produced in 293T cells by transfecting the cells with gene transfer vectors. Cells are placed in fresh culturing medium. The virus supernatant is collected 48-72 hours post-medium change by centrifugation at 800×g for 5 minutes. The supernatant is collected, filtered, and frozen in aliquots at −80° C. Non-viral gene delivery system is based on the TCBUSTER transposon system. Transgene expression is driven by one of the following promoters: EF-1, EFS, MND, MSCV, CMV, PGK, mCAG or RPBSA. The chimeric protein constructs are cloned into transposon vectors using SpeI/NheI restriction sites. Transposon DNA and mRNA encoding TCBUSTER transposase are co-delivered into immune cells, e.g., NK cells via electroporation with either a MAXCYTE or NEON electroporation instrument. Successful integration and expression efficiency are assessed post-transduction or post-transfection by flow cytometry to characterize chimeric protein expression.

### Example 2. Generation of an Engineered Protein of the Sink Modality

[0541] DNA constructs were prepared for expression in immune cells, e.g., NK cells as shown in Table 16 below:

TABLE 16
TGF-BR1 and TGF-BR2
engineered proteins (e.g., chimeric proteins)
of the sink modality.

| Sink | Extracellular | Transmembrane |
|---|---|---|
| Engineered protein | Domain (ECD) | Domain (TMD) |
| TGF-BR1 | TGF-BR1 | TGF-BR1 |
| TGF-BR2 | TGF-BR2 | TGF-BR2 |

[0542] The engineered protein (e.g., chimeric protein) constructs described in Table 16 are cloned into the multiple cloning site of retroviral gene transfer vectors: pELNS or pES.12-6(g)ps under control of one of the following promoters: EF-1, EFS, MND, MSCV, CMV, PGK, mCAG or RPBSA. Retrovirus is produced in 293T cells by transfecting the cells with gene transfer vectors. Cells are placed in fresh culturing medium. The virus supernatant is collected 48-72 hours post-medium change by centrifugation at 800×g for 5 minutes. The supernatant is collected, filtered, and frozen in aliquots at −80° C. Non-viral gene delivery system is based on TCBUSTER transposon system. Transgene expression is driven by one of the following promoters: EF-1, EFS, MND, MSCV, CMV, PGK, mCAG or RPBSA. The engineered protein (e.g., chimeric protein) constructs are cloned into transposon vectors using SpeI/NheI restriction sites. Transposon DNA and mRNA encoding TCBUSTER transposase are co-delivered into immune cells, e.g., NK cells, via electroporation with either a MAXCYTE or a NEON electroporation instrument. Successful integration and expression efficiency are assessed post-transduction or post-transfection by flow cytometry to characterize engineered protein (e.g., chimeric protein) expression.

### Example 3. Generation of an Engineered Protein of the Dominant Negative Receptor Modality

[0543] DNA constructs were prepared for expression in immune cells, e.g., NK cells, as shown in Table 17 below:

TABLE 17
TGF-BR1 and TGF-BR2 engineered
proteins of the dominant negative receptor
modality.

| DNR | | Transmembrane | Dominant |
|---|---|---|---|
| Engineered | Extracellular | Domain | Negative |
| protein | Domain (ECD) | (TMD) | Mutation |
| TGF-BR1 | TGF-BR1 | TGF-BR1 | K232R |
| TGF-BR2 | TGF-BR2 | TGF-BR2 | R537C |

[0544] The engineered protein constructs described in Table 17 are cloned into the multiple cloning site of retroviral gene transfer vectors: pELNS or pES.12-6(g)ps under control of one of the following promoters: EF-1, EFS, MND, MSCV, CMV, PGK, mCAG or RPBSA. Retrovirus is produced in 293T cells by transfecting the cells with gene transfer vectors. Cells are placed in fresh culturing medium. The virus supernatant is collected 48-72 hours post-medium change by centrifugation at 800×g for 5 minutes. The supernatant is collected, filtered, and frozen in aliquots at −80° C. Non-viral gene delivery system is based on TcBuster Transposon. Transgene expression is driven by one of the following promoters: EF-1, EFS, MND, MSCV, CMV, PGK, mCAG or RPBSA. The engineered protein constructs are cloned into transposon vectors using SpeI/NheI restriction sites. Transposon DNA and mRNA encoding TCBUSTER transposase system are co-delivered into immune cells, e.g., NK cells, via electroporation with either a MAXCYTE or a NEON electroporation instrument. Successful integration and expression efficiency are assessed post transduction by flow cytometry to characterize engineered protein expression.

### Example 4. Isolation of NK Cells from Peripheral Blood or Cord Blood

[0545] NK cells are isolated from either human peripheral blood leukapheresis samples or cord blood units. Briefly, leukapheresis samples or cord blood units are enriched for peripheral blood mononuclear cells (PBMC). One method for PBMC enrichment is separation using a Ficoll density gradient. Next, peripheral blood NK cells are isolated from PBMC samples using immunomagnetic separation beads. Beads are conjugated to a cocktail of specific immunophenotypic antibodies to enable NK cell isolation through either positive or negative selection. Isolated NK cells are activated prior to transduction. One method for NK cell activation is co-culture with irradiated artificial antigen presenting cells (aAPCs) expressing mbIL-21 and 4-1BBL for expansion in the presence of recombinant human IL-2 (hIL-2).

### Example 5. Derivation of NK Cells from iPSCs

[0546] The derivation of NK cells from iPSCs and engineered protein (e.g., chimeric protein) transfected iPSCs have been previously described (Knorr et al., Stem Cells Transl. Med. 2(4): 274-83, 2013; Ng et al., Nat Protoc. 3: 768-76, 2008; each of which is incorporated in its entirety herein by reference). Briefly, 3,000 TrypLE-adapted iPSCs are seeded in 96-well round-bottom plates with APEL culture (Ng et al., 2008, supra) containing 40 ng/ml human Stem Cell Factor (SCF), 20 ng/mL human vascular endothelial growth factor (VEGF), and 20 ng/mL recombinant human bone morphogenetic protein 4 (BMP-4). After day 11 of hematopoietic differentiation, spin embryoid bodies (EBs) are then directly transferred into each well of uncoated 24-well plates under a condition of NK cell culture. Cells are then further differentiated into NK cells as previously reported (Bachanova et al., Blood 123(25): 3855-63, 2014; Ni et al., Methods Mol. Biol. 1029: 33-41, 2013) using 5 ng/mL IL-3 (first week only), 10 ng/mL IL-15, 20 ng/mL IL-7, 20 ng/mL SCF, and 10 ng/mL Flt3 ligand for 28-32 days. Half-media changes are performed weekly.

### Example 6. Methods for Testing Expression and Function of Engineered Proteins in NK Cells

### Quantitative RT-PCR

[0547] To test the level of engineered protein (e.g., chimeric protein) expression in modified NK cells, RNA are processed from (day 9) NK cells. For cell cycle gene analysis, transcripts are evaluated using the Human Cell Cycle RT² Profiler PCR Array (Qiagen). The transcripts are analyzed and normalized to GAPDH.

### Immunoblot

[0548] To test the engineered protein (e.g., chimeric protein) expression in modified NK cells, suspension cells are lysed in RIPA lysis buffer with fresh protease inhibitor cocktail on ice for 20 min and sonicated for 2 seconds on ice. Membrane proteins are extracted using a Membrane Protein Extraction Kit. Sample proteins are measured by a standard bicinchoninic acid assay, size fractioned by polyacrylamide gel electrophoresis (PAGE), and are transferred to nitrocellulose membrane. Non-specific binding is blocked by incubating in TBST, 5% BSA, plus 1% Triton X-100 solution for 1 hour, followed by incubation with primary antibodies, overnight at 4° C. Species specific IRDye-conjugated secondary antibodies (1:10,000,) are applied to membranes for 1 hour at room temperature. Immunoreactive products are visualized in an Odyssey® Imaging System (LI-COR). All loading samples are normalized by staining of GAPDH.

### Cell Lysis Assay

[0549] Genetically modified peripheral blood NK cells are assessed for functionality in cell killing assays. One method to test the ability of the modified NK cells to specifically target cells for lysis is co-culture with human AML tumor cell lines expressing luciferase. Cell killing is characterized across a range of effector to target ratios (E:T). As a negative control, luciferase expressing cell lines are cultured with unmodified NK cells or NK cells expressing a non-targeting construct. An additional control is culture of luciferase expressing cell lines in the absence of NK cells. After a period of co-culture, luciferase signal is analyzed and compared to control samples. Target cell killing is observed as the decrease in luciferase signal in target cells relative to controls. Alternatively, target cell killing is observed as the release of luciferase into cell culture media.

### CD107a and Cytokine Expression

[0550] CD107a expression and cytokines such as IFNγ and TNFα by NK cells are assessed to characterize functionality. Genetically modified NK cells are co-cultured with human AML cell lines across a range of E:T ratios for a period of time. Cell surface expression of CD107a is assessed by flow cytometry with a CD107a-specific antibody. Cytokine expression is assessed by intracellular cytokine staining. Briefly, samples are treated with a protein transport inhibitor such as GolgiStop™ (BD Biosciences) for a period of time. Next, samples are treated with a fixation/permeabalization solution, stained with cytokine-specific antibodies, and assessed by flow cytometry. Alternatively, cytokine secretion into cell culture can be measured through multiplex ELISA. CD107a and cytokine expression are evaluated relative to controls including unmodified NK cells, NK cells expressing a non-engineered protein construct, and modified NK cells in the absence of target cells.

### Proliferation Assays

[0551] Proliferation of modified NK cells is assessed following co-culture with human AML tumor cell lines for a period of time. One method is covalent labeling of viable NK cells with a cell proliferation dye such as carboxyfluorescein succinimidyl ester (CFSE), where proliferation corresponds to dilution of dye. Alternatively, proliferation of modified NK cells is assessed by flow cytometry to determine NK cell counts. NK cells are labeled with NK-specific phenotypic markers and are negative for other lineage phenotypic markers. For both methods, proliferation of modified NK cells is compared to controls including unmodified NK cells, NK cells expressing a non-targeting construct, and modified NK cells in the absence of target cells.

### Example 7. In Vitro Activity Assays Using Engineered Cells Expressing Chimeric Proteins

[0552] A. Detecting Chimeric Protein-Induced Signaling Activity in a Jurkat Cell Line

[0553] Jurkat cells or related lymphocytic cell lines are transduced to express a chimeric protein provided herein are plated at 1×10⁵ cells/well in 96-well tissue culture plates. To stimulate the chimeric protein expressed by the cells, the cells are treated with an antibody or a recombinant protein ligand that binds to the extracellular domains of the chimeric protein (e.g., at a range of from about 0.1 ng/mL to about 100 ng/mL). For example, cells expressing a chimeric protein including the extracellular domain of TGFBR2 are stimulated using anti-TGFBR2 specific antibody (e.g., clone W17055E, BIOLEGEND) or recombinant TGF-B1 cytokine (R&D SYSTEMS). As positive controls, the cells or untransduced cells are stimulated with stimuli that activate non-transduced cells, such as phorbol 12-myristate 13-acetate (PMA) plus ionomycin, TNF-α, or anti-CD3 and anti-CD28 antibodies (e.g., clones OKT3 and CD28.2, BIOLEGEND). The cells are incubated for about 4 to 48 hours with the stimuli and subsequently analyzed by staining with a CD69-specific antibody (e.g., clone FN50, BIOLEGEND) and/or IL-2 production assessed using a sandwich ELISA method (e.g., using the Human IL-2 Tissue Culture Kit (MESO SCALE DIAGNOSTICS)).

[0554] B. Detecting Chimeric Protein-Induced NF-κB, AP-1, NFAT, or STAT Pathway Activity

[0555] Chimeric protein-induced NF-κB, AP-1, NFAT, or STAT pathway activity in cells engineered to express a chimeric protein provided herein can be assessed as follows. Reporter cell lines engineered to detect NF-κB, AP-1, NFAT, STAT1, STAT3, STAT4, STAT5, or STAT6 transcriptional activity (available from SYSTEMS BIOSCIENCES, INVIVOGEN, and PROMEGA) are transduced to express a chimeric protein provided herein and are plated at a in 96-well tissue culture plates. To stimulate the chimeric protein expressed by the cells, the cells are treated with an antibody or a recombinant protein ligand that binds to the extracellular domains of the chimeric protein (e.g., at a range of from about 0.1 ng/mL to about 100 ng/mL). For example, cells expressing a chimeric protein including the extracellular domain of TGFBR2 are stimulated using anti-TGFBR2 specific antibody (e.g., clone W17055E, BIOLEGEND) or recombinant TGF-B1 cytokine (R&D SYSTEMS). As positive controls, the cells or untransduced cells are stimulated with stimuli that activate one or more of NF-κB, AP-1, NFAT, STAT1, STAT3, STAT4, STAT5, or STAT6 transcriptional activity (e.g., TNF-α). The reporter cells are incubated for about 4 to 48 hours and subsequently analyzed by to detect reporter gene activity as recommended by the reporter cell supplier (e.g., fluorescence for cells expressing reporter GFP measured by, e.g., flow cytometry, luminescence for cells expressing reporter luciferase measured, e.g., by luminometry, or absorbance for cells expressing reporter alkaline phosphatase, measured by e.g., spectrophotometry).

[0556] C. Detecting Chimeric Protein-Induced PI3K Activity

[0557] Chimeric protein-induced PI3K activity in cells engineered to express a chimeric protein provided herein can be assessed as follows. HEK-293T cells, Jurkat cells, or other suitable cell lines, are transduced to express a chimeric protein and then transfected to express both FOXO transcription factor and a luciferase reporter gene cassette under the control of multimers of the FOXO responsive element located upstream of a minimal promoter (e.g., FOXO Reporter Kit, BPS Bioscience). The cells are plated at a density of 1×10⁴ to 1×10⁵ cells/well in 96-well tissue culture plates. After incubation for about 6 to 24 hours, the cells are stimulated with an antibody or a recombinant protein that binds to the extracellular domains of the chimeric protein (e.g., at a range of from about 0.1 ng/mL to about 100 ng/mL). For example, cells expressing a chimeric protein including the extracellular domain of TGFBR2 are stimulated using anti-TGFBR2 specific antibody (e.g., clone W17055E, BIOLEGEND) or recombinant TGF-B1 cytokine (R&D SYSTEMS). Stimuli that activate PI3K or Akt in untransduced cells, such as ethyl 2-amino-6-chloro-4-(1-cyano-2-ethoxy-2-oxoethyl)-4H-chromene-3-carboxylate (also known as SC79; Tocris Bioscience), are used as positive control. Cells are incubated for about 4 to about 48 hours and then analyzed by detecting luciferase activity, e.g., by luminometry.

[0558] D. Detecting Chimeric Protein-Induced Cell Signaling Activity by Phosphorylation of Downstream Signaling Proteins in Activating Pathways

[0559] Chimeric protein-induced cell signaling activity (e.g., by phosphorylation of downstream signaling proteins in activating pathways) in cells engineered to express a chimeric protein provided herein can be assessed as follows. NK cells, Jurkat cells, or other non-adherent lymphocytic cell lines, are transduced to express a chimeric protein provided herein, and the cells are plated at a density of 1×10⁵ cells/well in 96-well tissue culture plates. To stimulate the chimeric protein expressed by the cells, the cells are treated with an antibody or a recombinant protein ligand that binds to the extracellular domains of the chimeric protein (e.g., at a range of from about 0.1 ng/mL to about 100 ng/mL). For example, cells expressing a chimeric protein including the extracellular domain of TGFBR2 are stimulated using anti-TGFBR2 specific antibody (e.g., clone W17055E, BIOLEGEND) or recombinant TGF-B1 cytokine (R&D SYSTEMS). Stimuli that activate a signaling pathway in untransduced cells, such as PMA plus ionomycin (for NF-κB, AP-1, or NFAT) or IL-2 (for STAT5), are used as positive controls. The cells are incubated for 5 minutes to 3 hours then fixed, permeabilized, and analyzed by staining with antibodies specific for activating phosphorylation modifications in signaling pathway proteins downstream of the chimeric protein, e.g., as measured by flow cytometry. For example, phosphorylated levels of: RelA/p65 (using anti-phospho-NF-κB p65 (Ser536) rabbit monoclonal antibody (mAb), clone 93H1) for NF-κB activity, c-Jun (using phospho-c-Jun (Ser63) rabbit mAb, clone E617P) for AP-1 activity, STAT1 (using phospho-StatI (Tyr701) rabbit mAb, clone D4A7), STAT3 (using phospho-Stat3 (Tyr705) (D3A7) rabbit mAb, clone D3A7), STAT4 (using phospho-Stat4 (Tyr693) rabbit mAb, clone D2E4,) STAT5A/B (using phospho-Stat5 (Tyr694) rabbit mAb, clone C71E5), STAT6 (using phospho-Stat6 (Tyr641) rabbit mAb, clone D8S9Y), and/or Akt (using phospho-Akt (Ser473) rabbit mAb, clone D9E) for PI3K activity (each of the foregoing antibodies are available from CELL SIGNALING TECHNOLOGY).

### Example 8. In Vivo Studies Using Engineered NK Cells Expressing a Chimeric Protein

### Functionality of Switch Receptor In Vivo

[0560] NK cells engineered to express a chimeric protein provided herein or, as a control, an inert protein including a non-functional tag, are administered to immunodeficient NSG mice in doses of from about 1×10⁶-1×10⁷ NK cells per mouse either by intraperitoneal (IP) or intravenous (IV) injection. Ligands (e.g., a negative signal, e.g., TGF-B1) that bind to the extracellular domain of the chimeric protein may either be present in NSG mice (e.g., and be cross-reactive with the chimeric protein), or may be administered by IP or IV injection. NK cell numbers are compared after about 3 to 28 days, e.g., using flow cytometry, to detect NK cells in blood and/or peritoneal fluid. Mice treated with NK cells expressing chimeric proteins that impact the proliferation of the NK cells in vivo (e.g., in response to the ligand) may exhibit an increase in NK cell number (e.g., >25% or increase (e.g., calculated by adding >1 week to NK cell half-life compared to control NK cells)).

[0561] To assess the in vivo anti-tumor activity of NK cells expressing a chimeric protein provided herein, the following experiments may be performed. A solid tumor xenograft model is developed in NSG mice. The selected tumor cells can express combinations of endogenous and/or engineered ligands that can activate or inhibit engineered NK cells (e.g., an antigen that specifically binds to a CAR expressed by the NK cells and/or a ligand that binds to the extracellular domain of a chimeric protein expressed by the NK cells). The tumor cells may also be engineered to express luciferase. The tumor cells are implanted into the NSG mice in doses of about 5×10⁵ to about 1×10⁸ cells per mouse by subcutaneous, IP, or IV injection. NK cells engineered to express a chimeric protein provided herein or control NK cells that do not express the chimeric protein are administered to the mice in doses of 1×10⁶-1×10⁷ cells per tumor-bearing mouse by IP or IV injection. The tumor cells and NK cells may be co-administered to the mice on the same day, or the tumor cells may be administered 1 to 14 days prior to the NK cells (e.g., to allow for engraftment of the tumor cells). Tumor growth and expansion is monitored using caliper measurements, imaging of luminescence signal, or frequency of tumor cells in peripheral blood (e.g., measured by flow cytometry). Tumor clearance, tumor growth rate, the number of NK cells in tumor tissue (e.g., biopsied tumor tissue), NK cell persistence, and cytokine (e.g., IFN-7, TNF-α, IL-8, IP-10, MCP-1, and MIP-1a/b) production levels (e.g., in vivo or in vitro, e.g., in blood, peritoneal fluid, and/or tumor tissue) is assessed using methods known in the art. For example, cytokine production in vivo is measured in blood or peritoneal fluid and detected as protein (e.g., by sandwich ELISA) or in tumor cell-containing tissue (e.g., detected as mRNA following tissue homogenization, RNA isolation, and quantitative RT-PCR). Ex vivo cytokine production and/or cytotoxicity is measured using NK cells isolated from blood, peritoneal fluid, or single cell suspensions prepared from dissociation of tumor-containing tissue. After isolation, NK cells are cultured for about 4 to about 48 hours in media without stimulation to analyze cytokines and/or cytotoxicity using methods known in the art.

### Example 9. Reporter Cells Expressing Exemplary Chimeric Proteins with Different Extracellular Domains Convert Extracellular Negative Signal Stimulation into Activating Responses

[0562] Jurkat-NF-κB-GFP reporter cells expressing either chimeric proteins including the extracellular and transmembrane domains of the inhibitory receptors: BTLA (SR-100), CD200R (SR-102), CTLA-4 (SR-104), Fas (SR-105), IL-10RA (SR-106), IL-10RB (SR-107), GP130 (also known as IL-6RB; SR-109), PD1 (SR-111), TACTILE (also known as CD96; SR-112), and TIGIT (SR-113), and the intracellular domain of CD3ζ; chimeric proteins including the extracellular domains of BTLA (SR-115), CD200R (SR-117), CTLA-4 (SR-119), Fas (SR-120), IL-10RA (SR-121), IL-10RB (SR-122), GP130 (SR-124), PD1 (SR-126), TACTILE (SR-127), and TIGIT (SR-128), the transmembrane domain of CD28 and the intracellular domain of CD3ζ; or chimeric proteins including the extracellular domain of TGF-BR2, the transmembrane domain of CD28 and the intracellular domain of CD3ζ (TGFB-021) were generated. Each chimeric protein is described in Table 21 below. The reporter cells were stimulated with increasing doses of plate-coated agonist antibodies specific for the extracellular domain of the chimeric proteins, plate-coated recombinant FasL, or soluble recombinant TGF-B1. As positive control, reporter cells transduced to express a fusion protein including truncated CD19 (CD19₁₋₃₁₉) and a tag (“dCD19”) were stimulated through activation of endogenous CD3 and CD28 receptors using increasing doses of plate coated anti-CD3 and soluble anti-CD28 antibodies. As negative control, reporter cells expressing truncated non-signaling TGF-BR2₁₋₁₉₉ were stimulated using anti-TGF-BR2 antibody or soluble recombinant TGF-B1. Following an overnight incubation period with the stimulants, the reporter cells were analyzed by flow cytometry to measure the induction of CD69, a marker of cell activation (see, e.g., Castellanos et al. Eur J. Immunol. 32(11): 3108-17, 2002), and GFP, the engineered reporter of NF-κB activation in the reporter cells.

[0563] The results of these experiments are summarized in Table 19 below.

TABLE 19
Results Summary

| | | | | | | | Fold-change of MFI over no stimulation | | | | | |
|---|---|---|---|---|---|---|---|---|---|---|---|---|
| | Construct | | | | % | | GFP | | | CD69 | | |
| | ID | ECD | TM | ICD | Transduced | Stimulant | High | Med. | Low | High | Med. | Low |
| Pos. Control | CONT-101 | CD19 | CD19 | N/A | 94.7 | CD3 mAb + | 12.2 | 3.0 | 1.4 | 41.5 | 9.2 | 3.7 |
| | | | | | | CD28 mAb | | | | | | |
| Neg. Control | TGFB-007 | TGFBR2 | TGFBR2 | | 93.4 | TGFBR2 mAb | 1.0 | 0.9 | 0.8 | 2.0 | 1.5 | 1.3 |
| | TGFB-007 | TGFBR2 | TGFBR2 | | 93.4 | TGFB1 cytokine | 0.8 | 0.7 | 0.7 | 1.2 | 1.2 | 1.4 |
| Engineered | SR-100 | BTLA | BTLA | CD3z | 89.1 | BTLA mAb | 13.0 | 7.5 | 6.1 | 124.7 | 124.1 | 62.7 |
| protein design | SR-102 | CD200R | CD200R | | 86.9 | CD200R mAb | 6.8 | 1.4 | 0.8 | 29.2 | 4.9 | 1.3 |
| | SR-104 | CTLA4 | CTLA4 | | 87.5 | CTLA4 mAb | 4.3 | 3.8 | 2.2 | 7.2 | 5.6 | 3.1 |
| | SR-105 | Fas | Fas | | 87.7 | FasL | 7.3 | 4.6 | 1.0 | 70.2 | 35.7 | 8.4 |
| | | | | | | recombinant | | | | | | |
| | | | | | | protein | | | | | | |
| | SR-106 | IL10RA | IL10RA | | 83.1 | IL10RA mAb | 11.4 | 3.3 | 0.8 | 56.8 | 29.5 | 4.9 |
| | SR-107 | IL10RB | IL10RB | | 86.6 | IL10RB mAb | 13.8 | 9.3 | 2.9 | 108.3 | 86.1 | 32.2 |
| | SR-109 | GP130 | GP130 | | 90.9 | GP130 mAb | 6.3 | 2.6 | 0.5 | 122.6 | 22.0 | 1.1 |
| | SR-111 | PD1 | PD1 | | 85.1 | PD1 mAb | 5.8 | 1.4 | 1.3 | 37.6 | 1.9 | 1.2 |
| | SR-112 | TACTILE | TACTILE | | 57.5 | TACTILE mAb | 1.2 | 0.9 | 1.0 | 3.9 | 1.0 | 3.3 |
| | SR-113 | TIGIT | TIGIT | | 90.9 | TIGIT mAb | 4.6 | 2.2 | 0.9 | 17.1 | 17.1 | 7.2 |
| | SR-115 | BTLA | CD28 | | 87.1 | BTLA mAb | 3.5 | 6.9 | 5.1 | 9.2 | 14.1 | 10.8 |
| | SR-117 | CD200R | CD28 | | 83.7 | CD200R mAb | 5.9 | 0.9 | 1.1 | 8.7 | 1.1 | 0.9 |
| | SR-119 | CTLA4 | CD28 | | 92.7 | CTLA4 mAb | 5.9 | 4.6 | 2.6 | 6.2 | 4.5 | 2.7 |
| | SR-120 | Fas | CD28 | | 89.3 | FasL | 10.1 | 11.2 | 2.4 | 162.0 | 128.9 | 40.5 |
| | | | | | | recombinant | | | | | | |
| | | | | | | protein | | | | | | |
| | SR-121 | IL10RA | CD28 | | 90.6 | IL10RA mAb | 5.4 | 2.9 | 1.1 | 14.3 | 7.9 | 2.2 |
| | SR-122 | IL10RB | CD28 | | 91.9 | IL10RB mAb | 8.2 | 12.5 | 6.2 | 115.2 | 118.4 | 70.1 |
| | SR-124 | GP130 | CD28 | | 79.9 | GP130 mAb | 3.0 | 3.9 | 0.5 | 64.1 | 40.7 | 1.8 |
| | SR-126 | PD1 | CD28 | | 89.2 | PD1 mAb | 5.5 | 1.2 | 0.9 | 27.3 | 1.7 | 1.1 |
| | SR-127 | TACTILE | CD28 | | 79.5 | TACTILE mAb | 1.0 | 0.8 | 1.0 | 2.0 | 1.1 | 1.1 |
| | SR-128 | TIGIT | CD28 | | 96.4 | TIGIT mAb | 1.7 | 1.2 | 0.6 | 3.4 | 2.6 | 1.2 |
| | TGFB-021 | TGFBR2 | CD28 | | 92.5 | TGFBR2 mAb | 5.0 | 2.9 | 0.9 | 88.2 | 25.2 | 2.2 |
| | TGFB-021 | TGFBR2 | CD28 | | 92.5 | TGFB1 cytokine | 10.1 | 9.3 | 2.8 | 93.0 | 62.2 | 21.5 |

[0564] As shown in FIGS. 5 and 6, stimulation of the reporter cells expressing the chimeric proteins including the extracellular domains of inhibitory receptors induced a dose-dependent increase in NF-κB-dependent transcription (as measured by GFP expression), as compared to unstimulated transduced reporter cells (FIG. 5), as well as a dose-dependent increase in CD69 expression (FIG. 6), as compared to unstimulated transduced reporter cells. The sole exception was reporter cells expressing SR-112 (a chimeric protein that includes the extracellular domain of TACTILE) which exhibited a minimal increase in CD69 expression. The scale of the ligand (TGF-B1)-dependent increase in CD69 and NF-κB-induced GFP expression was similar among all samples, and in some cases, greater than the increase in CD69 and NK-κB-induced GFP expression induced in the control cells expressing dCD19.

[0565] These data demonstrate that the chimeric proteins including the extracellular domains of: BTLA (SR-100), CD200R (SR-102), CTLA-4 (SR-104), Fas (SR-105), IL-10RA (SR-106), IL-10RB (SR-107), GP130 (also known as IL-6RB; SR-109), PD1 (SR-111), TACTILE (SR-112), TIGIT (SR-113), and TGF-BR2 (TGFB-021) and the intracellular domain of CD3ζ, can be readily expressed. Moreover, expression of the chimeric proteins confers the cells the ability to convert negative extracellular stimuli into strong and dose-dependent activating signals. Notably, the chimeric proteins that were tested included extracellular domains of inhibitory receptors that are generally configured as monomers (e.g., PD-1, Freeman Proc. Nat'l. Acad. Sci. USA 105: 10275-6, 2008), homodimers (e.g., CTLA-4, Freeman 2008, supra), heterodimers (e.g., TGF-BR2, Allendorph et al. Proc. Nat'l. Acad. Sci. U.S.A. 103(20): 7643-8, 2006), and homotrimers (e.g., Fas, Salvesen and Riedl Cell Cycle 8(17): 2723-7, 2009). Interestingly, the structural and stoichiometric requirements of the native inhibitory receptors from which the chimeric proteins were derived did not appear to impact the functioning of the chimeric proteins.

### Example 10. Expression of Chimeric Proteins Including a TGF-BR2 Extracellular Domain and Various Intracellular Domains Convert TGF-B1 Stimuli into Activating Responses

[0566] Jurkat-NFκB-GFP reporter cells transduced to express chimeric proteins including the extracellular domain of TGF-BR2 and the intracellular domain of either: 4-1BB (TGFB-052), SLP76 (TGFB-056), MYD88 (TGFB-057), DAP12 (TGFB-058), TRAF1 (TGFB-059), TRAF2 (TGFB-060), TRAF3 (TGFB-061), TIRAP (TGFB-064), BLNK (TGFB-065), FCGR3 (TGFB-068), TLR4 (TGFB-087), Syk (TGFB-091), YES1 (TGFB-095), CD28 (TGFB-019), or CD3ζ (TGFB-021) (each described in Table 21 below). Transduced cells were left unstimulated or treated with increasing concentrations of recombinant TGF-B1 (0.032 ng/mL, 0.1 ng/mL, 0.32 ng/mL, 1 ng/mL, 3.2 ng/mL, 10 ng/mL, or 32 ng/mL) to stimulate the chimeric proteins expressed by the reporter cells. After an overnight incubation period, the reporter cells were analyzed by flow cytometry to measure the induction of CD69 and GFP. As a positive control, cells transduced to express dCD19 were stimulated through the activation of endogenous CD3 and CD28 receptors with 1 ug/mL plate-coated anti-CD3 antibody plus 5 ug/mL soluble anti-CD28 agonist antibodies. As negative controls, mock transduced reporter cells and reporter cells expressing dCD19 (CONT-101) were either left unstimulated or treated with either anti-TGBR2 antibody or increasing concentrations of recombinant TGF-B1.

[0567] As shown in FIG. 7A, TGF-B1 stimulation of the reporter cells expressing an chimeric protein including the extracellular domain of TGF-BR2 and an intracellular domain of either: SLP76 (TGFB-056), 4-1BB (TGFB-052), or CD3ζ (TGFB-021) each induced a dose-dependent increase in NF-κB-dependent transcription. Moreover, as shown in FIG. 7B, TGF-B1 stimulation induced a dose-dependent increase in CD69 expression in reporter cells expressing the chimeric proteins including the TGF-BR2 extracellular domain and either an intracellular domain of SLP76 (TGFB-056), of DAP12 (TGFB-058), of FCGR3A (TGFB-068), YES1 (TGFB-095), CD28 (TGFB-019), and CD3ζ (TGFB-021).

[0568] Interestingly, the expression of some of the chimeric proteins in the reporter cells was sufficient to activate signaling without extracellular TGF-B1 stimuli, as compared to mock transduced reporter cells and reporter cells expressing dCD19. Specifically, reporter cells expressing chimeric proteins including the extracellular domain of TGF-BR2 and either the intracellular domain of: MYD88 (TGFB-057), TRAF1 (TGFB-059), TRAF2 (TGFB-060), TRAF3 (TGFB-061), TIRAP (TGFB-064), TLR4 (TGFB-087), BLNK (TGFB-065), and Syk (TGFB-091) induced NF-κB-dependent transcription and/or increased CD69 expression levels independent of exogenous TGF-B1 exposure, while also exhibiting minimal to no change in either activation marker following exposure to exogenous TGF-B1. In addition, reporter cells expressing chimeric proteins including the extracellular domain of TGF-BR2 and either the intracellular domain of: 4-1BB (TGFB-052), SLP76 (TGFB-056), and YES1 (TGFB-095) exhibited both constitutive and dose-dependent TGF-B1-induced signaling.

[0569] Overall, these data demonstrate that expression of chimeric proteins including the extracellular domain of TGF-BR2 and an intracellular domain of a stimulatory polypeptide in an immune cell enables signal modulation in the cells capable of either: 1) dose-dependent conversion of a negative signal, TGF-B1, to an activating signaling event(s); 2) ligand-independent constitutive signaling; and 3) a combination of negative signal (TGF-B1)-induced activating signaling and independent constitutive activating signaling.

### Example 11. NK Cells Expressing Chimeric Proteins Including an Extracellular Domain of TGBR2 and One of Various Intracellular Domains Exhibit Increased Expansion, Cytotoxicity, and INF-γ and IP-10 Secretion

### NK Cell Expansion

[0570] The effect of NK cell expression of chimeric proteins including an extracellular domain of TGF-BR2 and the intracellular domain of either SLP76 (TGFB-056), MYD88 (TGFB-057), DAP12 (TGFB-058), TRAF1 (TGFB-059), TRAF2 (TGFB-060), TRAF3 (TGFB-061) TRAF6 (TGFB-062), TIRAP (TGFB-064), BLNK (TGFB-065), GRB2 (TGFB-066), FCGR2A (TGFB-67), FCGR3A (TGFB-068), 2B4 (TGFB-069), SLAMF1 (TGFB-070), SLAMF5 (TGFB-071), SLAMF6 (TGFB-072), SLAMF7 (TGFB-073), LFA2 (TGFB-074), SLAMF3 (TGFB-075), EPOR (TGFB-076), GCSFR (TGFB-077), CSF1R (TGFB-078), FGFR1 (TGFB-079), DNAM1 (TGFB-080), ICOS (TGFB-081), NKp46 (TGFB-082), NKp44 (TGFB-083), NKp30 (TGFB-084), IRAK4 (TGFB-086), TLR4 (TGFB-087), DR3 (TGFB-088), Syk (TGFB-091), Lyn (TGFB-094), YES1 (TGFB-095), Fgr (TGFB-096), 4-1BB (TGFB-052), DAP10 (TGFB-051), CD28 (TGFB-019), or CD3z (TGFB-021). As negative controls, mock transduced NK cells (Mock) and NK cells expressing dCD19 (CONT-101) were used. Each chimeric protein is described in Table 21 below. As shown in FIG. 8, NK cells expressing chimeric proteins including the extracellular domain of TGF-BR2 and the intracellular domain of either: DAP12 (TGFB-058), 2B4 (TGFB-069), SLAMF1 (TGFB-070), SLAMF5 (TGFB-071), SLAMF6 (TGFB-072), SLAMF7 (TGFB-073), SLAMF3 (TGFB-075), EPOR (TGFB-076), GCSFR (TGFB-077), CSF1R (TGFB-078), NKp46 (TGFB-082), or CD28 (TGFB-019) exhibited improved NK cell expansion following 5 days of chronic exposure to TGF-B1, as compared to control NK cells expressing dCD19.

[0571] NK cells expressing chimeric proteins including the extracellular domain of TGF-BR2 and either the intracellular domain of: 2B4 (TGFB-069), SLAMF1 (TGFB-070), SLAMF6 (TGFB-072), or SLAMF3 (TGFB-075) also exhibited improved NK cell expansion following 5 days of culture in the absence of exogenous TGF-B1 stimuli, as compared to control NK cells expressing dCD19. Chronic exposure of these NK cells to TGF-B1 further improved cell expansion. In contrast, NK cells expressing chimeric proteins including the extracellular domain of TGF-BR2 and the intracellular domain of either: NKp46 (TGFB-082) or CD28 (TGFB-019) exhibited an equivalent increase in cell expansion in the absence or presence of exogenous TGF-B1 exposure. These findings demonstrated that these chimeric proteins are constitutively active in NK cells and that their expression alone may be beneficial to NK cell expansion potential.

[0572] Surprisingly, expression of chimeric proteins including the TGF-BR2 extracellular domain and either an intracellular domain of SLAMF1 (TGFB-070), SLAMF3 (TGFB-075), 2B4 (TGFB-069), SLAMF5 (TGFB-071), SLAMF6 (TGFB-072), and SLAM7 (TGFB-073) induced the greatest gain of function in NK cell expansion. All six of these chimeric proteins include intracellular domains that are derived from SLAM family members and include Immune Tyrosine Switch Motifs (ITSMs). Although all of these SLAM family members contain an ITSM, the proteins are not believed to play interchangeable functions (see, e.g., Dragovich Autoimmun Rev. 17(7): 674-82, 2018).

[0573] Overall, these data demonstrated that the chimeric proteins could convert an immunosuppressive negative signal, TGF-B1, into a gain of function in NK cells: increased expansion potential.

### NK Cell Cytokine Secretion and Cytotoxicity

[0574] To analyze the effect of chimeric protein expression on NK cell cytokine production and cytotoxic activity, assays utilizing the SKOV-3 target cells were performed using the NK cells following chronic exposure to TGF-B1 or in the absence of TGF-B1 exposure. SKOV-3 tumor cells co-express inhibitor and activating ligands of three inhibitory signals reduce NK cell maximum cytokine production and cytotoxicity (see, e.g., Maas, Oncoimmunology 9(1): e1843247, 2020).

[0575] As shown in FIG. 9, NK cells expressing chimeric proteins including the extracellular domain of TGF-BR2 and either the intracellular domain of either: 2B4 (TGFB-069), SLAMF1 (TGFB-070), SLAMF5 (TGFB-071), SLAMF6 (TGFB-072), SLAMF7 (TGFB-073), EPOR (TGFB-076), GCSFR (TGFB-077), NKp46 (TGFB-082), CD28 (TGFB-019), 4-1BB (TGFB-052), or YES1 (TGFB-095) exhibited increased SKOV-3-induced interferon-gamma (IFN-7) production both with or without chronic TGF-B1 exposure, as compared to control NK cells expressing dCD19. This data demonstrated that these chimeric proteins were constitutively active in the NK cells and that the proteins enhanced the NK cells' capacity to produce INF-7 following target cell contact.

[0576] Moreover, NK cells expressing chimeric proteins including the extracellular domain of TGF-BR2 and the intracellular domain of either: SLAMF5 (TGFB-071), CSF1R (TGFB-078). or GCSFR (TGFB-077) exhibited enhanced SKOV-3 induced IFN-7 secretion following chronic TGF-B1 exposure, indicating that these three chimeric proteins confer a gain of function phenotype to NK cells that is both constitutive and ligand (TGF-B1)-dependent. In contrast, NK cells expressing chimeric proteins including the extracellular domain of TGF-BR2 and the intracellular domain of either: DAP10 (TGFB-051), CD3z (TGFB-021), or DR3 (TGFB-088) exhibited enhanced SKOV-3-induced IFN-7 production in the absence of chronic TGF-B1 exposure but not following chronic TGF-B1 exposure. This result demonstrated that these chimeric proteins are constitutively active in NK cells that enhance their INF-7 production capacity upon contact with target cells.

[0577] NK cells expressing chimeric proteins including the extracellular domain of TGBR2 and the intracellular domain of either: 2B4 (TGFB-069), SLAMF1 (TGFB-070), SLAMF5 (TGFB-071), SLAMF6 (TGFB-072), SLAMF7 (TGFB-073), EPOR (TGFB-076), or GCSFR (TGFB-077) exhibited increased SKOV-3-induced IP-10 production both with or without chronic TGF-B1 exposure, as compared with control NK cells expressing dCD19 (see FIG. 10). In contrast, NK cells expressing chimeric proteins including the extracellular domain of TGBR2 and the intracellular domain of either DAP10 (TGFB-051) or DR3 (TGFB-088) exhibited increased SKOV-3-induced IP-10 production in the absence of chronic TGF-B1 exposure but not following chronic TGF-B1 exposure. Overall, these results demonstrated that these chimeric proteins were constitutively active in the NK cells and enhanced the NK cells' IP-10 production capacity upon contact with target cells.

[0578] Interestingly, NK cells expressing an chimeric protein including the extracellular domain of TGF-BR2 and the intracellular domain of YES1 (TGFB-095) enhanced SKOV-3-induced IP-10 production selectively following TGF-B1 exposure, demonstrating that this chimeric protein confers a ligand-dependent gain of function to NK cells.

[0579] Finally, cytotoxicity assays were performed to assess the impact of the chimeric proteins on NK cells. As shown in FIG. 11, NK cells expressing chimeric proteins including the extracellular domain of TGF-BR2 and the intracellular domain of either: 2B4 (TGFB-069), SLAMF1 (TGFB-070), SLAMF5 (TGFB-071), SLAMF6 (TGFB-072), SLAMF7 (TGFB-073), EPOR (TGFB-076), GCSFR (TGFB-077), NKp46 (TGFB-082), or CD28 (TGFB-019) exhibited increased cytotoxic activity against SKOV-3 tumor cells both with or without chronic TGF-B1 pre-exposure, as compared with control NK cells expressing dCD19. This data demonstrated that these chimeric proteins were constitutively active in NK cells and enhanced their ability to kill the target tumor cells (i.e., SKOV-3 cells).

[0580] NK cells expressing an chimeric protein including the extracellular domain of TGF-BR2 and the intracellular domain of CSF1R (TGFB-078) enhanced the cytotoxicity of the NK cells selectively following chronic TGF-B1 exposure, demonstrating that this chimeric protein confers a ligand (TGF-B1)-dependent gain of function to NK cells. In contrast, NK cells expressing chimeric proteins including the extracellular domain of TGF-BR2 and the intracellular domain of either: DAP10 (TGFB-051), CD3ζ (TGFB-021), DR3 (TGFB-088), 4-1BB (TGFB-052), or YES1 (TGFB-095) increased NK cell cytotoxicity in the absence of chronic TGF-B1 exposure but not following chronic TGF-B1 exposure. These results demonstrated that these chimeric proteins were constitutively active in the NK cells and enhanced the NK cells' cytotoxic activity against target cells.

[0581] Surprisingly, NK cells expressing a chimeric protein including the extracellular domain of TFBR2 and the intracellular domain of YES1 exhibited the greatest increase in NK cell cytotoxicity in the absence of chronic TGF-B1 exposure—almost double the cytotoxicity that was observed by NK cells expressing the other chimeric proteins. YES1 is one of 8 Src-family cytoplasmic protein tyrosine kinases. In NK cells, the recruitment of Src-family kinases to cell surface receptors is critical to initiate both activating and inhibitory signaling (see Meza Guzman et al. Cancers 12(4): 952, 2020). However, NK cells expressing chimeric proteins including the intracellular domains of other Src-family kinases (e.g., Fgr (TGFB-096) and Lyn (TGFB-094)) did exhibit enhanced cytotoxicity, suggesting chimeric proteins including the intracellular domain of YES1 can have a selective advantage in priming NK cells for enhanced cytotoxic activity.

[0582] The data corresponding to Example 3 is summarized in Table 20 below.

TABLE 20
Results Summary

| | | | | | | | Average IFNg | | Average IP-10 | |
|---|---|---|---|---|---|---|---|---|---|---|
| | Transduction | Transduction | 5-Day Fold Expansion | | Average % Killing | | Secretion | | Secretion | |
| | Efficiency, | Efficiency, NK | 10 ng/mL | No | 10 ng/mL | No | 10 ng/mL | No | 10 ng/mL | No |
| Construct ID | Jurkat Cells | Cells | TGF-B1 | TGF-B1 | TGF-B1 | TGF-B1 | TGF-B1 | TGF-B1 | TGF-B1 | TGF-B1 |
| TGFB-056 | 49.4 | 9.5 | 0.41 | 0.70 | 2.07 | 16.05 | 1.68 | 5132.37 | UNDER | 1430.87 |
| TGFB-057 | 80.0 | 66.2 | 1.02 | 0.89 | 11.24 | 15.45 | 7771.60 | 5112.42 | 2758.66 | 1472.41 |
| TGFB-058 | 72.3 | 58.3 | 1.76 | 1.45 | 8.35 | 8.62 | 2364.21 | 1067.04 | 836.97 | 221.40 |
| TGFB-059 | 81.4 | 54.7 | 0.90 | 0.84 | 7.99 | 11.99 | 3057.45 | 2800.11 | 1296.50 | 816.81 |
| TGFB-060 | 70.9 | 34.8 | 1.11 | 1.40 | 8.77 | 10.55 | 3066.92 | 2146.22 | 1232.29 | 544.54 |
| TGFB-061 | 59.3 | 31.2 | 1.29 | 1.39 | 8.90 | 10.69 | 3092.46 | 2197.01 | 762.20 | 360.21 |
| TGFB-062 | 68.8 | 41.5 | 1.41 | 1.45 | 8.40 | 9.69 | 3012.76 | 2077.12 | 1369.84 | 509.05 |
| TGFB-064 | 67.0 | 48.9 | 1.04 | 1.11 | 9.89 | 9.04 | 4793.52 | 2697.08 | 1536.76 | 467.80 |
| TGFB-065 | 73.8 | 39.5 | 0.71 | 0.78 | 9.68 | 11.32 | 3134.42 | 3493.24 | 1027.76 | 650.10 |
| TGFB-066 | 34.7 | 23.7 | 1.44 | 1.37 | 8.89 | 6.86 | 3274.12 | 1127.69 | 1242.01 | 187.49 |
| TGFB-051 | 63.9 | 57.9 | 1.42 | 1.33 | 11.41 | 17.50 | 4201.64 | 7257.03 | 670.75 | 1224.37 |
| TGFB-021 | 59.1 | 61.5 | 0.45 | 1.18 | 2.26 | 15.90 | UNDER | 8855.22 | UNDER | 2002.40 |
| TGFB-067 | 56.6 | 52.7 | 1.60 | 1.26 | 11.75 | 9.94 | 4640.09 | 3562.63 | 1044.33 | 500.31 |
| TGFB-068 | 48.7 | 37.5 | 1.55 | 0.92 | 8.25 | 16.65 | 2822.77 | 5132.19 | 686.50 | 839.76 |
| TGFB-069 | 78.1 | 71.4 | 3.86 | 2.24 | 14.40 | 23.02 | OVER | OVER | 2342.69 | 1821.08 |
| TGFB-070 | 74.7 | 66.8 | 4.03 | 1.88 | 13.25 | 21.91 | 7687.75 | OVER | 1630.33 | 1513.97 |
| TGFB-071 | 81.4 | 71.5 | 3.06 | 1.37 | 18.77 | 17.75 | OVER | 7378.81 | 2296.84 | 1485.50 |
| TGFB-072 | 63.5 | 61.3 | 3.89 | 1.79 | 14.98 | 17.29 | 8702.74 | 8752.26 | 1880.88 | 2084.17 |
| TGFB-073 | 64.0 | 61.6 | 3.08 | 0.90 | 13.13 | 19.28 | 6905.27 | OVER | 1420.25 | 1657.32 |
| TGFB-074 | 41.2 | 38.8 | 2.40 | 1.44 | 11.22 | 14.58 | 5734.39 | 5516.58 | 1172.09 | 1506.55 |
| TGFB-075 | 72.7 | 58.5 | 3.86 | 2.45 | 9.64 | 14.26 | 4417.77 | 4407.46 | 1039.20 | 1114.15 |
| TGFB-076 | 72.3 | 54.9 | 2.94 | 1.37 | 14.27 | 18.15 | 6648.59 | 6104.32 | 1336.90 | 1141.19 |
| TGFB-077 | 65.1 | 52.6 | 2.52 | 1.19 | 14.40 | 15.01 | 6643.39 | 4956.00 | 1411.44 | 923.86 |
| TGFB-078 | 69.2 | 40.1 | 2.14 | 1.52 | 15.24 | 9.90 | 6322.80 | 2933.81 | 999.86 | 688.84 |
| TGFB-079 | 58.2 | 38.0 | 1.49 | 1.19 | 9.28 | 8.59 | 3578.95 | 1660.44 | 685.32 | 303.97 |
| TGFB-080 | 62.7 | 53.2 | 2.11 | 2.23 | 10.78 | 15.11 | 4381.97 | 4292.84 | 1230.70 | 1209.45 |
| TGFB-081 | 74.5 | 67.5 | 2.31 | 2.80 | 18.77 | 17.83 | OVER | 7726.72 | 2176.27 | 1885.33 |
| TGFB-082 | 68.4 | 61.9 | 3.26 | 2.85 | 20.43 | 17.07 | 7170.48 | 6053.91 | 1346.39 | 1233.19 |
| TGFB-083 | 67.0 | 55.7 | 2.08 | 2.76 | 14.07 | 16.14 | 3957.04 | 4083.78 | 968.50 | 804.85 |
| TGFB-084 | 71.8 | 63.4 | 2.19 | 2.18 | 13.72 | 16.04 | 4866.92 | 4251.35 | 1339.51 | 1040.21 |
| TGFB-019 | 52.1 | 55.0 | 1.99 | 1.88 | 21.11 | 19.48 | 6699.87 | 6549.49 | 1165.68 | 1082.83 |
| TGFB-086 | 51.8 | 13.4 | 1.76 | 2.08 | 7.83 | 14.23 | 3147.62 | 3392.39 | 938.14 | 746.35 |
| TGFB-087 | 65.1 | 49.5 | 2.51 | 1.97 | 11.95 | 16.75 | 6062.36 | 5906.26 | 1256.42 | 1092.36 |
| TGFB-088 | 14.7 | 54.7 | 0.66 | 0.72 | 2.23 | 13.51 | UNDER | 6151.66 | UNDER | 2665.41 |
| TGFB-052 | 71.2 | 64.3 | 1.57 | 1.06 | 12.76 | 22.96 | 8769.31 | OVER | 976.30 | 1045.64 |
| TGFB-091 | 49.9 | 10.5 | 0.24 | 0.43 | 1.90 | 1.74 | UNDER | UNDER | UNDER | UNDER |
| TGFB-094 | 75.2 | 44.7 | 1.20 | 1.47 | 16.51 | 10.04 | OVER | 2869.89 | 3205.68 | 733.56 |
| TGFB-095 | 78.3 | 37.2 | 1.69 | 1.41 | 11.76 | 40.40 | 6083.67 | OVER | 1892.04 | 906.32 |
| TGFB-096 | 77.3 | 47.0 | 1.00 | 0.91 | 15.99 | 23.65 | OVER | OVER | 2329.70 | 1284.39 |
| TGFB-007 | 68.3 | 67.7 | 2.00 | 1.42 | 24.06 | 14.20 | OVER | 6340.12 | 2149.84 | 1242.53 |
| dCD19 | 55.3 | 53.9 | 1.44 | 1.37 | 10.22 | 14.87 | 4498.80 | 3807.07 | 1110.72 | 605.02 |
| Mock | 1.3 | 0.4 | 1.08 | 2.18 | 6.82 | 11.32 | 2372.82 | 2716.49 | 958.59 | 483.80 |

TN = Transduction;
ND = Not detectable;
OVER = >9,000 pg/mL IFN-γ

### Materials and Methods for Examples 9, 10 and 11

[0583] Isolation and Expansion of Human NK Cells from Peripheral Blood

[0584] Human NK cells were isolated from fresh peripheral blood using the EasySep™ Human NK Cell Isolation Kit (STEMCELL TECHNOLOGIES) according to the manufacturer's instructions. Cells were activated by co-culture with engineered feeder cell line at a 2:1 (engineered feeder cell:NK) ratio and expanded prior to being frozen in cryopreservation media.

### Viral Particle Production

[0585] Viral particles encoding the chimeric proteins listed in Table 21 (below), and a fusion protein including truncated CD19 (CD19₁₋₃₁₉) and a tag (“dCD19”) were generated. Briefly, packaging cells seeded in 24-well plates in Dulbecco's modified eagle medium (DMEM) supplemented with 10% fetal bovine serum (FBS) were transfected with viral constructs using the PEIpro® transfection reagent (POLYPLUS) according to the manufacturer's instructions. 24-hours post-transfection, the culture media was changed to HyClone™ SFM4Transfx-293 serum free media (CYTIVA). Culture supernatants containing viral particles were collected 48 and 72 hours post-transfection, combined and stored at 4° C. until ready for use.

TABLE 21
Tested chimeric proteins

| | | | Amino |
|---|---|---|---|
| | | Amino | acid |
| | | acid | sequence |
| | Description (extracellular | sequence | without |
| | domain (ECD)- | with signal | signal |
| | transmembrane domain | peptide- | peptide- |
| | (TM)-intracellular domain | SEQ ID | SEQ ID |
| Construct ID | (ICD) (signal peptides excluded) | NO: | NO: |
| CONT-101 (“dCD19”) | CD19 ECD-CD19 TM | — | — |
| AA-SR-100 (SR-100) | BTLA ECD-BTLA TM-CD3z ICD | 556 | 557 |
| AA-SR-102 (SR-102) | CD200R ECD-CD200R TM-CD3z ICD | 558 | 559 |
| AA-SR-104 (SR-104) | CTLA4 ECD-CTLA4 TM-CD3z ICD | 560 | 561 |
| AA-SR-105 (SR-105) | Fas ECD-Fas TM-CD3z ICD | 562 | 563 |
| AA-SR-106 (SR-106) | IL10RA ECD-IL10RA TM-CD3z ICD | 564 | 565 |
| AA-SR-107 (SR-107) | IL10RB ECD-IL10RB TM-CD3z ICD | 566 | 567 |
| AA-SR-109 (SR-109) | GP130 ECD-GP130 TM-CD3z ICD | 568 | 569 |
| AA-SR-111 (SR-111) | PD1 ECD-PD1 TM-CD3z ICD | 570 | 571 |
| AA-SR-112 (SR-112) | TACTILE ECD-TACTILE TM-CD3z ICD | 572 | 573 |
| AA-SR-113 (SR-113) | TIGIT ECD-TIGIT TM-CD3z ICD | 574 | 575 |
| AA-SR-115 (SR-115) | BTLA ECD-CD28 TM-CD3z ICD | 576 | 577 |
| AA-SR-117 (SR-117) | CD200R ECD-CD28 TM-CD3z ICD | 578 | 579 |
| AA-SR-119 (SR-119) | CTLA4 ECD-CD28 TM-CD3z ICD | 580 | 581 |
| AA-SR-120 (SR-120) | Fas ECD-CD28 TM-CD3z ICD | 582 | 583 |
| AA-SR-121 (SR-121) | IL10RA ECD-CD28 TM-CD3z ICD | 584 | 585 |
| AA-SR-122 (SR-122) | IL10RB ECD-CD28 TM-CD3z ICD | 586 | 587 |
| AA-SR-124 (SR-124) | GP130 ECD-CD28 TM-CD3z ICD | 588 | 589 |
| AA-SR-126 (SR-126) | PD1 ECD-CD28 TM-CD3z ICD | 590 | 591 |
| AA-SR-127 (SR-127) | TACTILE ECD-CD28 TM-CD3z ICD | 592 | 593 |
| AA-SR-128 (SR-128) | TIGIT ECD-CD28 TM-CD3z ICD | 594 | 595 |
| AA-TGFB-056 (TGFB-056) | TGF-BR2 ECD-CD28 Long TM-SLP76 ICD | 596 | 597 |
| AA-TGFB-057 (TGFB-057) | TGF-BR2 ECD-CD28 Long TM-MYD88 ICD | 598 | 599 |
| AA-TGFB-058 (TGFB-058) | TGF-BR2 ECD-DAP12 TM-DAP12 ICD | 600 | 601 |
| AA-TGFB-059 (TGFB-059) | TGF-BR2 ECD-CD28 Long TM-TRAF1 ICD | 602 | 603 |
| AA-TGFB-060 (TGFB-060) | TGF-BR2 ECD-CD28 Long TM-TRAF2 ICD | 604 | 605 |
| AA-TGFB-061 (TGFB-061) | TGF-BR2 ECD-CD28 Long TM-TRAF3 ICD | 606 | 607 |
| AA-TGFB-062 (TGFB-062) | TGF-BR2 ECD-CD28 Long TM-TRAF6 ICD | 608 | 609 |
| AA-TGFB-064 (TGFB-064) | TGF-BR2 ECD-CD28 Long TM-TIRAP ICD | 610 | 611 |
| AA-TGFB-065 (TGFB-065) | TGF-BR2 ECD-CD28 Long TM-BLNK ICD | 612 | 613 |
| AA-TGFB-066 (TGFB-066) | TGF-BR2 ECD-CD28 Long TM-GRB2 ICD | 614 | 615 |
| AA-TGFB-067 (TGFB-067) | TGF-BR2 ECD-FCGR2A TM-FCGR2A ICD | 616 | 617 |
| AA-TGFB-068 (TGFB-068) | TGF-BR2 ECD-FCGR3A TM-FCGR3A ICD | 618 | 619 |
| AA-TGFB-069 (TGFB-069) | TGF-BR2 ECD-2B4 TM-2B4 ICD | 620 | 621 |
| AA-TGFB-070 (TGFB-070) | TGF-BR2 ECD-SLAMF1 TM-SLAMF1 ICD | 622 | 623 |
| AA-TGFB-071 (TGFB-071) | TGF-BR2 ECD-SLAMF5 TM-SLAMF5 ICD | 624 | 625 |
| AA-TGFB-072 (TGFB-072) | TGF-BR2 ECD-SLAMF6 TM-SLAMF6 ICD | 626 | 627 |
| AA-TGFB-073 (TGFB-073) | TGF-BR2 ECD-SLAMF7 TM-SLAMF7 ICD | 628 | 629 |
| AA-TGFB-074 (TGFB-074) | TGF-BR2 ECD-LFA2 TM-LFA2 ICD | 630 | 631 |
| AA-TGFB-075 (TGFB-075) | TGF-BR2 ECD-SLAMF3 TM-SLAMF3 ICD | 632 | 633 |
| AA-TGFB-076 (TGFB-076) | TGF-BR2 ECD-EPOR TM-EPOR ICD | 634 | 635 |
| AA-TGFB-077 (TGFB-077) | TGF-BR2 ECD-GCSFR TM-GCSFR ICD | 636 | 637 |
| AA-TGFB-078 (TGFB-078) | TGF-BR2 ECD-CSF1R TM-CSF1R ICD | 638 | 639 |
| AA-TGFB-079 (TGFB-079) | TGF-BR2 ECD-FGFR1 TM-FGFR1 ICD | 640 | 641 |
| AA-TGFB-080 (TGFB-080) | TGF-BR2 ECD-DNAM1 TM-DNAM1 ICD | 642 | 643 |
| AA-TGFB-081 (TGFB-081) | TGF-BR2 ECD-ICOS TM-ICOS ICD | 644 | 645 |
| AA-TGFB-082 (TGFB-082) | TGF-BR2 ECD-NKp46 TM-NKp46 ICD | 646 | 647 |
| AA-TGFB-083 (TGFB-083) | TGF-BR2 ECD-NKp44 TM-NKp44 ICD | 648 | 649 |
| AA-TGFB-084 (TGFB-084) | TGF-BR2 ECD-NKp30 TM-NKp30 ICD | 650 | 651 |
| AA-TGFB-086 (TGFB-086) | TGF-BR2 ECD-CD28 Long TM-IRAK4 ICD | 652 | 653 |
| AA-TGFB-087 (TGFB-087) | TGF-BR2 ECD-TLR4 TM-TLR4 ICD | 654 | 655 |
| AA-TGFB-088 (TGFB-088) | TGF-BR2 ECD-DR3 TM-DR3 ICD | 656 | 657 |
| AA-TGFB-091 (TGFB-091) | TGF-BR2 ECD-CD28 Long TM-Syk ICD | 658 | 659 |
| AA-TGFB-094 (TGFB-094) | TGF-BR2 ECD-CD28 Long TM-Lyn ICD | 660 | 661 |
| AA-TGFB-095 (TGFB-095) | TGF-BR2 ECD-CD28 Long TM-YES1 ICD | 662 | 663 |
| AA-TGFB-096 (TGFB-096) | TGF-BR2 ECD-CD28 Long TM-Fgr ICD | 664 | 665 |
| AA-TGFB-052 (TGFB-052) | TGF-BR2 ECD-CD28 TM-41BB ICD | 666 | 667 |
| AA-TGFB-051 (TGFB-051) | TGF-BR2 ECD-CD28 TM-DAP10v2 ICD | 668 | 669 |
| AA-TGFB-019 (TGFB-019) | TGF-BR2 ECD-CD28 TM-CD28 ICD | 670 | 671 |
| AA-TGFB-021 (TGFB-021) | TGF-BR2 ECD-CD28 TM-CD3z ICD | 672 | 673 |
| AA-TGFB-007 (TGFB-007) | TGF-BR2 ECD-TGFBR2 TM-TGFBR2 truncated | 674 | 675 |
| | ICD | | |

### Cell Transduction

[0586] Previously expanded human NK cells were thawed and cultured overnight in the presence of 100 IU/mL of recombinant human IL-2. The next day, the NK cells were activated by co-culture with engineered feeder cells at a 2:1 ratio, and the NK cells were cultured for 72 hours.

[0587] Previously collected viral supernatants were loaded into RetroNectin (TAKARA BIO)-coated 24-well tissue culture plates. Following supernatant removal, 5×10⁵ activated human NK cells or Jurkat-NFκB-GFP reporter cells (SYSTEM BIOSCIENCES) were added to the plates. After 3 days of culture, the transduced NK cells were collected and counted using an automated cell counter. Jurkat-NF-κB-GFP cells were collected following 4 days of culture and counted using an automated cell counter. Approximately 1×10⁵ cells from each transduced cell culture were collected for staining. Cells were pelleted using centrifugation and resuspended in Cell Staining Buffer (BIOLEGEND) and then stained with antibodies to detect the expression of the chimeric proteins following the manufacturer's recommended protocols. Stained cells were analyzed using a BD FACSymphony™ A3 cell analyzer (BD BIOSCIENCES).

### Jurkat-NFκB-GFP Reporter Assays

[0588] Transduced Jurkat-NF-κB-GFP reporter cells expressing a chimericprotein of interest were plated at 1×10⁵ cells per well in 96-well tissue culture plates previously coated with increasing concentrations of a monoclonal antibody (mAb) targeting the extracellular domain of the chimeric protein expressed by the cells (low: 0.4 μg/mL; medium: 2 μg/mL; or high: 10 μg/mL), soluble TGF-B1 (low: 0.002 μg/mL; medium: 0.01 μg/mL; or high: 0.05 μg/mL; PEPROTECH) or plate-coated FasL (low: 0.4 μg/mL; medium: 2 μg/mL; or high: 10 μg/mL; THERMO FISHER SCIENTIFIC) (“stimulants”). Cells were incubated with their respective treatment conditions overnight, collected and analyzed by flow cytometry for expression of GFP and CD69.

[0589] The monoclonal antibodies that were used were: anti-CD3 mAb clone OKT3, anti-CD28 mAb clone CD28.2, anti-TIM-3 mAb clone F38-2E2, anti-CD161 mAb clone HP-3G10, anti-CD96 mAb clone NK92.39, anti-TIGIT mAb clone A15153G, anti-BTLA mAb clone MIH26, anti-CD200R mAb clone OX-108, anti-CD33 mAb clone WM53, anti-PD-1 mAb clone EH12.2H7, and anti-TGF-BR2 mAb clone W17055E (each from BIOLEGEND); anti-NKG2A mAb clone 131411, anti-CTLA-4 mAb clone 1003705, anti-IL-10RA mAb clone 37607, anti-IL-10RB mAb clone 90220, anti-IL-6RA mAb clone 17506R, anti-gp130 mAb clone 28126, and anti-CD94 mAb clone 131412 (each from R&D Systems); anti-CD160 mAb clone CNX46-3, anti-LILRB2 mAb clone 42D1), and anti-KLRG1 mAb clone 13F12F2 (each from THERMO FISHER SCIENTIFIC).

### Exposure of Human NK Cells to Chronic TGF-B1 Treatment

[0590] To expose human NK cells to chronic stimulation with TGF-B1 cytokine, 5×10⁵ human NK cells transduced to express each chimeric protein were collected on day 3 post-transduction and plated in 24-well cell culture plates. The cells were cultured for 5 days in the presence of 100 IU/mL recombinant human IL-2 cytokine, with either 10 ng/mL recombinant TGF-B1 cytokine (PEPROTECH), or noTGF-B1 as a control. Fresh cytokine was added to the NK cells on days 2 and 4 of the culture. On day 5, the NK cells were collected and counted using an automated cell counter. Cell survival was assessed by flow cytometry and cells were counted to calculate fold expansion.

### Cytokine and Chemokine Analysis

[0591] To detect secreted soluble factors (i.e., IP10 and interferon-gamma (IFN-7)), supernatant samples were collected and stored at −20° C. Subsequently, the supernatant samples were thawed and analyzed using either the V-PLEX Proinflammatory Panel 1 Human Kit (to detect IFN-7) and the V-PLEX Chemokine Panel 1 Human 1 Human Kit (to detect IP-10) (both from MESO SCALE DIAGNOSTICS), and the MESO QuickPlex SQ 120 instrument (MESO SCALE DIAGNOSTICS).

### Evaluation of NK Cell Cytotoxicity Against Tumor Cells

[0592] For cytotoxicity assays, SKOV-3 target cells expressing NanoLuc® luciferase (SKOV3-luc Cells) were seeded in 96-well plates and cultured for 24-hours. Transduced NK cells were treated with 10 ng/mL of -TGF-B1 for 5 days as described above in the “Exposure of human NK cells to chronic TGF-B1 treatment” section, prior to being collected and plated for the cytotoxicity assay. For both acute and chronic assays, NK cells were added to the assay wells to achieve a 3:1 ratio of NK cells to SKOV3-Luc target cells and incubated overnight. Control wells contained NK cells alone or target cells alone.

[0593] For each sample, 10 μL of supernatant was collected and placed in 96-well assay plates (PERKINELMER HEALTH SCIENCES). For control wells containing target cells only, supernatant was removed and 200 μL of Passive Lysis 5× buffer (PROMEGA) was added to the wells to lyse the SKOV3-Luc cells. 10 μL of lysate was then used in assays to obtain a “maximum killing luminescence” value to normalize luminescence from the remaining samples. For the remaining samples, Nano-Glo® Luciferase Assay System (PROMEGA) was added, and luminescence measured using an EnVision® multimode plate reader (PERKINELMER) according to the manufacturer's protocol. The percent of target cell killing was calculated as 100%×luminescence from supernatant/maximum killing luminescence.

[0594] All of the methods disclosed and claimed herein can be made and executed without undue experimentation in light of the present disclosure. While the compositions and methods of this disclosure have been described in terms of preferred embodiments, it will be apparent to those of skill in the art that variations may be applied to the methods and in the steps or in the sequence of steps of the method described herein without departing from the concept, spirit, and scope of the disclosure. More specifically, it will be apparent that certain agents which are both chemically and physiologically related may be substituted for the agents described herein while the same or similar results would be achieved. All such similar substitutes and modifications apparent to those skilled in the art are deemed to be within the spirit, scope, and concept of the disclosure as defined by the appended claims.

1. A chimeric protein comprising an extracellular domain, a transmembrane domain, and an intracellular domain, wherein the extracellular domain is capable of binding a negative signal, and wherein the intracellular domain comprises an intracellular domain, or a portion thereof, of a stimulatory polypeptide, and the negative signal is selected from the group consisting of IL-10, TGF-β, IL-1, IL-6, PD-L1, PD-L2, B7-1, B7-2, MHCI, HVEM, CD155, CD112, CD111, CD200, B7-H6, HS-GAG, HLA, N-cadherin, E-cadherin, FasL, MHCII, TIM-3, IL-18, adenosine, and prostaglandin.

2. The chimeric protein of claim 1, wherein said chimeric protein is capable of activating an immune cell selected from a natural killer (NK) cell, an NKT cell, a T cell, and a macrophage.

3. (canceled)

4. The chimeric protein of claim 1, wherein the extracellular domain comprises an antigen-binding domain that specifically binds to the negative signal.

5.-8. (canceled)

9. The chimeric protein of claim 1, wherein the extracellular domain comprises the extracellular domain, or a portion thereof, of an inhibitory polypeptide that binds the negative signal.

10. The chimeric protein of claim 9, wherein the inhibitory polypeptide is an inflammatory mediator receptor, an inhibitory cytokine receptor, an immune checkpoint receptor, or a dual activator-checkpoint receptor.

11. The chimeric protein of claim 9, wherein the inhibitory polypeptide is selected from the inhibitory polypeptides presented in Table 1 or Table 1.1.

12. The chimeric protein of claim 1, wherein the transmembrane domain comprises the transmembrane domain, or a portion thereof, of an inhibitory polypeptide presented in Table 1 or Table 1.2, or a stimulatory polypeptide presented in Table 2 or Table 2.2.

13. (canceled)

14. The chimeric protein of claim 1, wherein the intracellular domain comprises the intracellular domain, or a portion thereof, of a stimulatory polypeptide selected from the stimulatory polypeptides presented in Table 2 or Table 2.1.

15.-16. (canceled)

17. The chimeric protein of claim 1, wherein:
the inhibitory polypeptide is a type I receptor, and the stimulatory polypeptide is a type I receptor;
the inhibitory polypeptide is a type I receptor, and the stimulatory polypeptide is a type III receptor;
the inhibitory polypeptide is a type II receptor, and the stimulatory polypeptide is a type II receptor;
the inhibitory polypeptide is a type I receptor, and the stimulatory polypeptide is not associated with the plasma membrane; or
the inhibitory polypeptide is a type I receptor, the stimulatory polypeptide is a type II receptor, and the transmembrane domain, or portion thereof, is from a type I receptor.

18. (canceled)

19. The chimeric protein of claim 1, wherein a combination of the extracellular domain, or a portion thereof, of an inhibitory polypeptide and the intracellular domain, or a portion thereof, of a stimulatory polypeptide is selected from the combinations presented in any one of Tables 6-14.

20. The chimeric protein of claim 1, wherein the extracellular domain and the transmembrane domain are connected by a linker.

21. The chimeric protein of claim 1, wherein the transmembrane domain and the intracellular domain are connected by a linker.

22. (canceled)

23. A modified immune cell engineered to express a chimeric protein comprising an extracellular domain, a transmembrane domain, and an intracellular domain, wherein the extracellular domain is capable of binding a negative signal, and wherein the intracellular domain comprises an intracellular domain, or a portion thereof, of a stimulatory polypeptide, and the negative signal is selected from the group consisting of IL-10, TGF-β, IL-1, IL-6, PD-L1, PD-L2, B7-1, B7-2, MHCI, HVEM, CD155, CD112, CD111, CD200, B7-H6, HS-GAG, HLA, N-cadherin, E-cadherin, FasL, MHCII, TIM-3, IL-18, adenosine, and prostaglandin.

24.-46. (canceled)

47. A chimeric protein comprising an extracellular domain, a transmembrane domain, and an intracellular domain, wherein the extracellular domain binds to TGF-β, and wherein the intracellular domain comprises an intracellular domain, or a portion thereof, of a stimulatory polypeptide.

48.-69. (canceled)

70. A modified immune cell engineered to express a chimeric protein comprising an extracellular domain, a transmembrane domain, and an intracellular domain, wherein the extracellular domain binds to TGF-β, and wherein the intracellular domain comprises an intracellular domain, or a portion thereof, of a stimulatory polypeptide.

71.-91. (canceled)

92. The modified immune cell of claim 70, wherein the immune cell is engineered to further comprise a cytokine.

93.-94. (canceled)

95. A protein comprising an extracellular domain and a transmembrane domain, wherein the extracellular domain is capable of binding a negative signal, and wherein the protein lacks a fully functional intracellular domain, and the negative signal is selected from the group consisting of IL-10, TGF-β, IL-1, IL-6, PD-L1, PD-L2, B7-1, B7-2, MHCI, HVEM, CD155, CD112, CD111, CD200, B7-H6, HS-GAG, HLA, N-cadherin, E-cadherin, FasL, MHCII, TIM-3, IL-18, adenosine, and prostaglandin.

96.-110. (canceled)

111. A modified cell engineered to express a protein comprising an extracellular domain and a transmembrane domain, wherein the extracellular domain is capable of binding a negative signal, and wherein the protein lacks a fully functional intracellular domain, and the negative signal is selected from the group consisting of IL-10, TGF-β, IL-1, IL-6, PD-L1, PD-L2, B7-1, B7-2, MHCI, HVEM, CD155, CD112, CD111, CD200, B7-H6, HS-GAG, HLA, N-cadherin, E-cadherin, FasL, MHCII, TIM-3, IL-18, adenosine, and prostaglandin.

112.-131. (canceled)

132. A modified cell engineered to express a protein comprising a dominant negative isoform of a protein, wherein the dominant negative isoform of the protein competes with a wild-type isoform of the protein for binding a negative signal, wherein the negative signal is selected from the group consisting of IL-10, TGF-β, IL-1, IL-6, PD-L1, PD-L2, B7-1, B7-2, MHCI, HVEM, CD155, CD112, CD111, CD200, B7-H6, HS-GAG, HLA, N-cadherin, E-cadherin, FasL, MHCII, TIM-3, IL-18, adenosine, and prostaglandin.

133.-145. (canceled)

146. A modified cell engineered to express at least two proteins selected from the group consisting of:
(a) a chimeric protein comprising an extracellular domain, a transmembrane domain, and an intracellular domain, wherein the extracellular domain is capable of binding a negative signal, and wherein the intracellular domain comprises an intracellular domain, or a portion thereof, of a stimulatory polypeptide;
(b) a protein comprising a dominant negative isoform of a protein, wherein the dominant negative isoform of the protein competes with a wild-type isoform of the protein for binding a negative signal that prevents the activation of an immune response; and
(c) a protein comprising an extracellular domain and a transmembrane domain, wherein the extracellular domain is capable of binding a negative signal, and wherein the protein lacks a fully functional intracellular domain,
wherein the negative signal is selected from the group consisting of IL-10, TGF-β, IL-1, IL-6, PD-L1, PD-L2, B7-1, B7-2, MHCI, HVEM, CD155, CD112, CD111, CD200, B7-H6, HS-GAG, HLA, N-cadherin, E-cadherin, FasL, MHCII, TIM-3, IL-18, adenosine, and prostaglandin.

147.-149. (canceled)

150. A polynucleotide comprising a nucleic acid sequence encoding a chimeric protein of claim 1.

151. A pharmaceutical composition comprising the modified cell of claim 23, and a pharmaceutically acceptable excipient.

152. A method of treating a subject in need of an altered immune response, the method comprising administering to the subject an effective amount of a composition comprising the modified cell of claim 23, thereby treating the subject in need of the altered immune response.

153. A method of treating a disease or pathological condition in a subject, comprising administering to the subject an effective amount of a composition comprising the modified cell of claim 23, thereby treating the disease or pathological condition in the subject.

154. A method of treating a cancer in a subject, comprising administering to the subject a therapeutically effective amount of a composition comprising the modified cell of claim 23, thereby treating the cancer in the subject.

155. A method of generating the modified cell of any one of the preceding claims, the method comprising:
(a) introducing a nucleic acid encoding the chimeric protein of claim 1, into a cell;
(b) culturing the cell under conditions allowing the expression of the protein in or on the cell; and
(c) recovering the cell from the culture,
thereby generating the modified cell.

156. A cell obtained by the method of claim 155.

157. A kit comprising a chimeric protein and/or a nucleic acid encoding the chimeric protein, wherein the chimeric protein is the chimeric protein of claim 1.

158. A kit comprising an engineered protein and/or a nucleic acid encoding the engineered protein, wherein the engineered protein is the engineered protein of claim 95.

The application's sequence listing, which the Patent Office published only in electronic form, follows.

SEQUENCE LISTING (687 sequences)

SEQ ID NO: 1 - protein, 2 aa, Artificial Sequence
  source: /note="Description of Artificial Sequence: Synthetic peptide"
GG

SEQ ID NO: 2 - protein, 2 aa, Artificial Sequence
  source: /note="Description of Artificial Sequence: Synthetic peptide"
AA

SEQ ID NO: 3 - protein, 5 aa, Artificial Sequence
  source: /note="Description of Artificial Sequence: Synthetic peptide"
  MOD_RES (3)..(3): Any amino acid
  VARIANT (5)..(5): /replace="Ala"
  SITE (1)..(5): /note="Variant residues given in the sequence have no preference with respect to those in the annotations for variant positions"
LPXTG

SEQ ID NO: 4 - protein, 6 aa, Artificial Sequence
  source: /note="Description of Artificial Sequence: Synthetic peptide"
  MOD_RES (3)..(3): Any amino acid
LPXTGG

SEQ ID NO: 5 - protein, 127 aa, Homo sapiens
KESCDVQLYIKRQSEHSILAGDPFELECPVKYCANRPHVTWCKLNGTTCVKLEDRQTSWKEEKNISFFILHFEPVLPNDNGSYRCSANFQSNLIESHSTTLYVTDVKSASERPSKDEMASRPWLLYR

SEQ ID NO: 6 - protein, 138 aa, Homo sapiens
GCINITSSASQEGTRLNLICTVWHKKEEAEGFVVFLCKDRSGDCSPETSLKQLRLKRDPGIDGVGEISSQLMFTISQVTPLHSGTYQCCARSQKSGIRLQGHFFSILFTETGNYTVTGLKQRQHLEFSHNEGTLSSGF

SEQ ID NO: 7 - protein, 215 aa, Homo sapiens
MDEKQITQNYSKVLAEVNTSWPVKMATNAVLCCPPIALRNLIIITWEIILRGQPSCTKAYRKETNETKETNCTDERITWVSRPDQNSDLQIRPVAITHDGYYRCIMVTPDGNFHRGYHLQVLVTPEVTLFQNRNRTAVCKAVAGKPAAQISWIPEGDCATKQEYWSNGTVTVKSTCHWEVHNVSTVTCHVSHLTGNKSLYIELLPVPGAKKSAKL

SEQ ID NO: 8 - protein, 242 aa, Homo sapiens
DPNFWLQVQESVTVQEGLCVLVPCTFFHPIPYYDKNSPVHGYWFREGAIISRDSPVATNKLDQEVQEETQGRFRLLGDPSRNNCSLSIVDARRRDNGSYFFRMERGSTKYSYKSPQLSVHVTDLTHRPKILIPGTLEPGHSKNLTCSVSWACEQGTPPIFSWLSAAPTSLGPRTTHSSVLIITPRPQDHGTNLTCQVKFAGAGVTTERTIQLNVTYVPQNPTTGIFPGDGSGKQETRAGVVH

SEQ ID NO: 9 - protein, 394 aa, Homo sapiens
QLTTESMPFNVAEGKEVLLLVHNLPQQLFGYSWYKGERVDGNRQIVGYAIGTQQATPGPANSGRETIYPNASLLIQNVTQNDTGFYTLQVIKSDLVNEEATGQFHVYPELPKPSISSNNSNPVEDKDAVAFTCEPETQDTTYLWWINNQSLPVSPRLQLSNGNRTLTLLSVTRNDTGPYECEIQNPVSANRSDPVTLNVTYGPDTPTISPSDTYYRPGANLSLSCYAASNPPAQYSWLINGTFQQSTQELFIPNITVNNSGSYTCHANNSVTGCNRTTVKTIIVTELSPVVAKPQIKASKTTVTGDKDSVNLTCSTNDTGISIRWFFKNQSLPSSERMKLSQGNTTLSINPVKREDAGTYWCEVFNPISKNQSDPIMLNVNYNALPQENGLSPG

SEQ ID NO: 10 - protein, 126 aa, Homo sapiens [sequence omitted]

SEQ ID NO: 11 - protein, 148 aa, Homo sapiens
QVTDINSKGLELRKTVTTVETQNLEGLHHDGQFCHKPCPPGERKARDCTVNGDEPDCVPCQEGKEYTDKAHFSSKCRRCRLCDEGHGLEVEINCTRTQNTKCRCKPNFFCNSTVCEHCDPCTKCEHGIIKECTLTSNTKCKEEGSRSN

SEQ ID NO: 12 - protein, 288 aa, Homo sapiens
LYLQAWPNPVFEGDALTLRCQGWKNTPLSQVKFYRDGKFLHFSKENQTLSMGAATVQSRGQYSCSGQVMYIPQTFTQTSETAMVQVQELFPPPVLSAIPSPEPREGSLVTLRCQTKLHPLRSALRLLFSFHKDGHTLQDRGPHPELCIPGAKEGDSGLYWCEVAPEGGQVQKQSPQLEVRVQAPVSRPVLTLHHGPADPAVGDMVQLLCEAQRGSPPILYSFYLDEKIVGNHSAPCGGTTSLLFPVKSEQDAGNYSCEAENSVSRERSEPKKLSLKGSQVLFTPASNW

SEQ ID NO: 13 - protein, 214 aa, Homo sapiens
HGTELPSPPSVWFEAEFFHHILHWTPIPNQSESTCYEVALLRYGIESWNSISNCSQTLSYDLTAVTLDLYHSNGYRARVRAVDGSRHSNWTVTNTRFSVDEVTLTVGSVNLEIHNGFILGKIQLPRPKMAPANDTYESIFSHFREYEIAIRKVPGNFTFTHKKVKHENFSLLTSGEVGEFCVQVKPSVASRSNKGMWSKEECISLTRQYFTVTN

SEQ ID NO: 14 - protein, 201 aa, Homo sapiens
MVPPPENVRMNSVNFKNILQWESPAFAKGNLTFTAQYLSYRIFQDKCMNTTLTECDFSSLSKYGDHTLRVRAEFADEHSDWVNITFCPVDDTIIGPPGMQVEVLADSLHMRFLAPKIENEYETWTMKNVYNSWTYNVQYWKNGTDEKFQITPQYDFEVLRNLEPWTTYCVQVRGFLPDRNKAGEWSEPVCEQTTHDETVPS

SEQ ID NO: 15 - protein, 118 aa, Homo sapiens
MPGVCDRAPDFLSPSEDQVLRPALGSSVALNCTAWVVSGPHCSLPSVQWLKDGLPLGIGGHYSLHEYSWVKANLSEVLVSSVLGVNVTSTEVYGAFTCSIQNISFSSFTLQRAGPTSH

SEQ ID NO: 16 - protein, 346 aa, Homo sapiens
LAPRRCPAQEVARGVLTSLPGDSVTLTCPGVEPEDNATVHWVLRKPAAGSHPSRWAGMGRRLLLRSVQLHDSGNYSCYRAGRPAGTVHLLVDVPPEEPQLSCFRKSPLSNVVCEWGPRSTPSLTTKAVLLVRKFQNSPAEDFQEPCQYSQESQKFSCQLAVPEGDSSFYIVSMCVASSVGSKFSKTQTFQGCGILQPDPPANITVTAVARNPRWLSVTWQDPHSWNSSFYRLRFELRYRAERSKTFTTWMVKDLQHHCVIHDAWSGLRHVVQLRAQEEFGQGEWSEWSPEAMGTPWTESRSPPAENEVSTPMQALTTNKDDDNILFRDSANATSLPVQDSSSVPLP

SEQ ID NO: 17 - protein, 597 aa, Homo sapiens
ELLDPCGYISPESPVVQLHSNFTAVCVLKEKCMDYFHVNANYIVWKTNHFTIPKEQYTIINRTASSVTFTDIASLNIQLTCNILTFGQLEQNVYGITIISGLPPEKPKNLSCIVNEGKKMRCEWDGGRETHLETNFTLKSEWATHKFADCKAKRDTPTSCTVDYSTVYFVNIEVWVEAENALGKVTSDHINFDPVYKVKPNPPHNLSVINSEELSSILKLTWTNPSIKSVIILKYNIQYRTKDASTWSQIPPEDTASTRSSFTVQDLKPFTEYVFRIRCMKEDGKGYWSDWSEEASGITYEDRPSKAPSFWYKIDPSHTQGYRTVQLVWKTLPPFEANGKILDYEVTLTRWKSHLQNYTVNATKLTVNLTNDRYLATLTVRNLVGKSDAAVLTIPACDFQATHPVMDLKAFPKDNMLWVEWTTPRESVKKYILEWCVLSDKAPCITDWQQEDGTVHRTYLRGNLAESKCYLITVTPVYADGPGSPESIKAYLKQAPPSKGPTVRTKKVGKNEAVLEWDQLPVDVQNGFIRNYTIFYRTIIGNETAVNVDSSHTEYTLSSLTSDTLYMVRMAAYTDEGGKDGPEFTFTTPKFAQGEIE

SEQ ID NO: 18 - protein, 224 aa, Homo sapiens
HEGVHRKPSLLAHPGPLVKSEETVILQCWSDVMFEHFLLHREGMFNDTLRLIGEHHDGVSKANFSISRMTQDLAGTYRCYGSVTHSPYQVSAPSDPLDIVIIGLYEKPSLSAQPGPTVLAGENVTLSCSSRSSYDMYHLSREGEAHERRLPAGPKVNGTFQADFPLGPATHGGTYRCFGSFHDSPYEWSKSSDPLLVSVTGNPSNSWPSPTEPSSKTGNPRHLH

SEQ ID NO: 19 - protein, 224 aa, Homo sapiens
HEGVHRKPSLLAHPGRLVKSEETVILQCWSDVRFEHFLLHREGKFKDTLHLIGEHHDGVSKANFSIGPMMQDLAGTYRCYGSVTHSPYQLSAPSDPLDIVITGLYEKPSLSAQPGPTVLAGESVTLSCSSRSSYDMYHLSREGEAHECRFSAGPKVNGTFQADFPLGPATHGGTYRCFGSFRDSPYEWSNSSDPLLVSVIGNPSNSWPSPTEPSSKTGNPRHLH

SEQ ID NO: 20 - protein, 224 aa, Homo sapiens
HEGVHRKPSLLAHPGPLVKSEETVILQCWSDVRFQHFLLHREGKFKDTLHLIGEHHDGVSKANFSIGPMMQDLAGTYRCYGSVTHSPYQLSAPSDPLDIVITGLYEKPSLSAQPGPTVLAGESVTLSCSSRSSYDMYHLSREGEAHERRFSAGPKVNGTFQADFPLGPATHGGTYRCFGSFRDSPYEWSNSSDPLLVSVTGNPSNSWPSPTEPSSETGNPRHLH

SEQ ID NO: 21 - protein, 217 aa, Homo sapiens
HEGGQDKPLLSAWPSAVVPRGGHVTLLCRSRLGFTIFSLYKEDGVPVPELYNKIFWKSILMGPVTPAHAGTYRCRGSHPRSPIEWSAPSNPLVIVVTGLFGKPSLSAQPGPTVRTGENVTLSCSSRSSFDMYHLSREGRAHEPRLPAVPSVNGTFQADFPLGPATHGGTYTCFGSLHDSPYEWSDPSDPLLVSVTGNSSSSSSSPTEPSSKTGIRRH

SEQ ID NO: 22 - protein, 217 aa, Homo sapiens
HEGGQDKPLLSAWPSAVVPRGGHVTLLCRSRLGFTIFSLYKEDGVPVPELYNKIFWKSILMGPVTPAHAGTYRCRGSHPRSPIEWSAPSNPLVIVVTGLFGKPSLSAQPGPTVRTGENVTLSCSSRSSFDMYHLSREGRAHEPRLPAVPSVDGTFQADFPLGPATHGGTYTCFSSLHDSPYEWSDPSDPLLVSVTGNSSSSSSSPTEPSSKTGIRRH

SEQ ID NO: 23 - protein, 319 aa, Homo sapiens
HMGGQDKPFLSAWPSAVVPRGGHVTLRCHYRHRFNNFMLYKEDRIHIPIFHGRIFQESFNMSPVTTAHAGNYTCRGSHPHSPTGWSAPSNPVVIMVTGNHRKPSLLAHPGPLVKSGERVILQCWSDIMFEHFFLHKEGISKDPSRLVGQIHDGVSKANFSIGPMMLALAGTYRCYGSVTHTPYQLSAPSDPLDIVVTGPYEKPSLSAQPGPKVQAGESVTLSCSSRSSYDMYHLSREGGAHERRLPAVRKVNRTFQADFPLGPATHGGTYRCFGSFRHSPYEWSDPSDPLLVSVTGNPSSSWPSPTEPSSKSGNPRHLH

SEQ ID NO: 24 - protein, 319 aa, Homo sapiens
LMGGQDKPFLSARPSTVVPRGGHVALQCHYRRGFNNFMLYKEDRSHVPIFHGRIFQESFIMGPVTPAHAGTYRCRGSRPHSLTGWSAPSNPLVIMVTGNHRKPSLLAHPGPLLKSGETVILQCWSDVMFEHFFLHREGISEDPSRLVGQIHDGVSKANFSIGPLMPVLAGTYRCYGSVPHSPYQLSAPSDPLDIVITGLYEKPSLSAQPGPTVQAGENVTLSCSSWSSYDIYHLSREGEAHERRLRAVPKVNRTFQADFPLGPATHGGTYRCFGSFRALPCVWSNSSDPLLVSVTGNPSSSWPSPTEPSSKSGICRHLH

SEQ ID NO: 25 - protein, 297 aa, Homo sapiens
QDKPFLSAWPGTVVSEGQHVTLQCRSRLGFNEFSLSKEDGMPVPELYNRIFRNSFLMGPVTPAHAGTYRCCSSHPHSPTGWSAPSNPVVIMVTGVHRKPSLLAHPGPLVKSGETVILQCWSDVRFERFLLHREGITEDPLRLVGQLHDAGSQVNYSMGPMTPALAGTYRCFGSVTHLPYELSAPSDPLDIVVVGLYGKPSLSAQPGPTVQAGENVTLSCSSRSLFDIYHLSREAEAGELRLTAVLRVNGTFQANFPLGPVTHGGNYRCFGSFRALPHAWSDPSDPLPVSVTGNSRHL

SEQ ID NO: 26 - protein, 428 aa, Homo sapiens
LQPGAEVPVVWAQEGAPAQLPCSPTIPLQDLSLLRRAGVTWQHQPDSGPPAAAPGHPLAPGPHPAAPSSWGPRPRRYTVLSVGPGGLRSGRLPLQPRVQLDERGRQRGDFSLWLRPARRADAGEYRAAVHLRDRALSCRLRLRLGQASMTASPPGSLRASDWVILNCSFSRPDRPASVHWFRNRGQGRVPVRESPHHHLAESFLFLPQVSPMDSGPWGCILTYRDGFNVSIMYNLTVLGLEPPTPLTVYAGAGSRVGLPCRLPAGVGTRSFLTAKWTPPGGGPDLLVTGDNGDFTLRLEDVSQAQAGTYTCHIHLQEQQLNATVTLAIITVTPKSFGSPGSLGKLLCEVTPVSGQERFVWSSLDTPSQRSFSGPWLEAQEAQLLSQPWQCQLYQGERLLGAAVYFTELSSPGAQRSGRAPGALPAGHL

SEQ ID NO: 27 - protein, 438 aa, Homo sapiens
GHLPKPTLWAEPGSVITQGSPVTLRCQGGQETQEYRLYREKKTALWITRIPQELVKKGQFPIPSITWEHAGRYRCYYGSDTAGRSESSDPLELVVTGAYIKPTLSAQPSPVVNSGGNVILQCDSQVAFDGFSLCKEGEDEHPQCLNSQPHARGSSRAIFSVGPVSPSRRWWYRCYAYDSNSPYEWSLPSDLLELLVLGVSKKPSLSVQPGPIVAPEETLTLQCGSDAGYNRFVLYKDGERDFLQLAGAQPQAGLSQANFTLGPVSRSYGGQYRCYGAHNLSSEWSAPSDPLDILIAGQFYDRVSLSVQPGPTVASGENVTLLCQSQGWMQTFLLTKEGAADDPWRLRSTYQSQKYQAEFPMGPVTSAHAGTYRCYGSQSSKPYLLTHPSDPLELVVSGPSGGPSSPTTGPTSTSGPEDQPLTPTGSDPQSGLGRHLGV

SEQ ID NO: 28 - protein, 440 aa, Homo sapiens
QTGTIPKPTLWAEPDSVITQGSPVTLSCQGSLEAQEYRLYREKKSASWITRIRPELVKNGQFHIPSITWEHTGRYGCQYYSRARWSELSDPLVLVMTGAYPKPTLSAQPSPVVTSGGRVTLQCESQVAFGGFILCKEGEEEHPQCLNSQPHARGSSRAIFSVGPVSPNRRWSHRCYGYDLNSPYVWSSPSDLLELLVPGVSKKPSLSVQPGPVVAPGESLTLQCVSDVGYDRFVLYKEGERDLRQLPGRQPQAGLSQANFTLGPVSRSYGGQYRCYGAHNLSSECSAPSDPLDILITGQIRGTPFISVQPGPTVASGENVTLLCQSWRQFHTFLLTKAGAADAPLRLRSIHEYPKYQAEFPMSPVTSAHAGTYRCYGSLNSDPYLLSHPSEPLELVVSGPSMGSSPPPTGPISTPAGPEDQPLTPTGSDPQSGLGRHLGV

SEQ ID NO: 29 - protein, 420 aa, Homo sapiens
GPFPKPTLWAEPGSVISWGSPVTIWCQGSQEAQEYRLHKEGSPEPLDRNNPLEPKNKARFSIPSMTEHHAGRYRCHYYSSAGWSEPSDPLEMVMTGAYSKPTLSALPSPVVASGGNMTLRCGSQKGYHHFVLMKEGEHQLPRTLDSQQLHSRGFQALFPVGPVTPSHRWRFTCYYYYTNTPWVWSHPSDPLEILPSGVSRKPSLLTLQGPVLAPGQSLTLQCGSDVGYNRFVLYKEGERDFLQRPGQQPQAGLSQANFTLGPVSPSNGGQYRCYGAHNLSSEWSAPSDPLNILMAGQIYDTVSLSAQPGPTVASGENVTLLCQSWWQFDTFLLTKEGAAHPPLRLRSMYGAHKYQAEFPMSPVTSAHAGTYRCYGSYSSNPHLLSHPSEPLELVVSGHSGGSSLPPTGPPSTPGLGRYLE

SEQ ID NO: 30 - protein, 238 aa, Homo sapiens
QAGPLPKPTLWAEPGSVISWGNSVTIWCQGTLEAREYRLDKEESPAPWDRQNPLEPKNKARFSIPSMTEDYAGRYRCYYRSPVGWSQPSDPLELVMTGAYSKPTLSALPSPLVTSGKSVTLLCQSRSPMDTFLLIKERAAHPLLHLRSEHGAQQHQAEFPMSPVTSVHGGTYRCFSSHGFSHYLLSHPSDPLELIVSGSLEDPRPSPTRSVSTAAGPEDQPLMPTGSVPHSGLRRHWE

SEQ ID NO: 31 - protein, 435 aa, Homo sapiens
GTLPKPTLWAEPASVIARGKPVTLWCQGPLETEEYRLDKEGLPWARKRQNPLEPGAKAKFHIPSTVYDSAGRYRCYYETPAGWSEPSDPLELVATGFYAEPTLLALPSPVVASGGNVTLQCDTLDGLLTFVLVEEEQKLPRTLYSQKLPKGPSQALFPVGPVTPSCRWRFRCYYYYRKNPQVWSNPSDLLEILVPGVSRKPSLLIPQGSVVARGGSLTLQCRSDVGYDIFVLYKEGEHDLVQGSGQQPQAGLSQANFTLGPVSRSHGGQYRCYGAHNLSPRWSAPSDPLDILIAGLIPDIPALSVQPGPKVASGENVTLLCQSWHQIDTFFLTKEGAAHPPLCLKSKYQSYRHQAEFSMSPVTSAQGGTYRCYSAIRSYPYLLSSPSYPQELVVSGPSGDPSLSPTGSTPTPGPEDQPLTPTGLDPQSGLGRHLG

SEQ ID NO: 32 - protein, 118 aa, Homo sapiens
ALWVSQPPEIRTLEGSSAFLPCSFNASQGRLAIGSVTWFRDEVVPGKEVRNGTPEFRGRLAPLASSRFLHDHQAELHIRDVRGHDASIYVCRVEVLGLGVGTGNGTRLVVEKEHPQLG

SEQ ID NO: 33 - protein, 147 aa, Homo sapiens
FLDSPDRPWNPPTFSPALLVVTEGDNATFTCSFSNTSESFVLNWYRMSPSNQTDKLAAFPEDRSQPGQDCRFRVTQLPNGRDFHMSVVRARRNDSGTYLCGAISLAPKAQIKESLRAELRVTERRAEVPTAHPSPSPRPAGQFQTLV

SEQ ID NO: 34 - protein, 534 aa, Homo sapiens
MDGRFWIRVQESVMVPEGLCISVPCSFSYPRQDWTGSTPAYGYWFKAVTETTKGAPVATNHQSREVEMSTRGRFQLTGDPAKGNCSLVIRDAQMQDESQYFFRVERGSYVRYNFMNDGFFLKVTALTQKPDVYIPETLEPGQPVTVICVFNWAFEECPPPSFSWTGAALSSQGTKPTTSHFSVLSFTPRPQDHNTDLTCHVDFSRKGVSAQRTVRLRVAYAPRDLVISISRDNTPALEPQPQGNVPYLEAQKGQFLRLLCAADSQPPATLSWVLQNRVLSSSHPWGPRPLGLELPGVKAGDSGRYTCRAENRLGSQQRALDLSVQYPPENLRVMVSQANRTVLENLGNGTSLPVLEGQSLCLVCVTHSSPPARLSWTQRGQVLSPSQPSDPGVLELPRVQVEHEGEFTCHARHPLGSQHVSLSLSVHYSPKLLGPSCSWEAEGLHCSCSSQASPAPSLRWWLGEELLEGNSSQDSFEVTPSSAGPWANSSLSLHGGLSSGLRLRCEAWNVHGAQSGSILQLPDKKGLISTAFSN

SEQ ID NO: 35 - protein, 335 aa, Homo sapiens
QKSNRKDYSLTMQSSVTVQEGMCVHVRCSFSYPVDSQTDSDPVHGYWFRAGNDISWKAPVATNNPAWAVQEETRDRFHLLGDPQTKNCTLSIRDARMSDAGRYFFRMEKGNIKWNYKYDQLSVNVTALTHRPNILIPGTLESGCFQNLTCSVPWACEQGTPPMISWMGTSVSPLHPSTTRSSVLTLIPQPQHHGTSLTCQVTLPGAGVTTNRTIQLNVSYPPQNLTVTVFQGEGTASTALGNSSSLSVLEGQSLRLVCAVDSNPPARLSWTWRSLTLYPSQPSNPLVLELQVHLGDEGEFTCRAQNSLGSQHVSLNLSLQQEYTGKMRPVSGVLL

SEQ ID NO: 36 - protein, 331 aa, Homo sapiens
QTSKLLTMQSSVTVQEGLCVHVPCSFSYPSHGWIYPGPVVHGYWFREGANTDQDAPVATNNPARAVWEETRDRFHLLGDPHTKNCTLSIRDARRSDAGRYFFRMEKGSIKWNYKHHRLSVNVTALTHRPNILIPGTLESGCPQNLTCSVPWACEQGTPPMISWIGTSVSPLDPSTTRSSVLTLIPQPQDHGTSLTCQVTFPGASVTTNKTVHLNVSYPPQNLTMTVFQGDGTVSTVLGNGSSLSLPEGQSLRLVCAVDAVDSNPPARLSLSWRGLTLCPSQPSNPGVLELPWVHLRDAAEFTCRAQNPLGSQQVYLNVSLQSKATSGVTQG

SEQ ID NO: 37 - protein, 498 aa, Homo sapiens
VWEKTVNTEENVYATLGSDVNLTCQTQTVGFFVQMQWSKVTNKIDLIAVYHPQYGFYCAYGRPCESLVTFTETPENGSKWTLHLRNMSCSVSGRYECMLVLYPEGIQTKIYNLLIQTHVTADEWNSNHTIEIEINQTLEIPCFQNSSSKISSEFTYAWSVENSSTDSWVLLSKGIKEDNGTQETLISQNHLISNSTLLKDRVKLGTDYRLHLSPVQIFDDGRKFSCHIRVGPNKILRSSTTVKVFAKPEIPVIVENNSTDVLVERRFTCLLKNVFPKANITWFIDGSFLHDEKEGIYITNEERKGKDGFLELKSVLTRVHSNKPAQSDNLTIWCMALSPVPGNKVWNISSEKITFLLGSEISSTDPPLSVTESTLDTQPSPASSVSPARYPATSSVTLVDVSALRPNTTPQPSNSSMTTRGFNYPWTSSGTDTKKSVSRIPSETYSSSPSGAGSTLHDNVFTSTARAFSEVPTTANGSTKTNHVHITGIVVNKPKDGM

SEQ ID NO: 38 - protein, 93 aa, Homo sapiens
LQCFCHLCTKDNFTCVTDGLCFVSVTETTDKVIHNSMCIAEIDLIPRDRPFVCAPSSKTGSVTTTYCCNQDHCNKIELPTTVKSSPGLGPVEL

SEQ ID NO: 39 - protein, 144 aa, Homo sapiens
TIPPHVQKSVNNDMIVTDNNGAVKFPQLCKFCDVRFSTCDNQKSCMSNCSITSICEKPQEVCVAVWRKNDENITLETVCHDPKLPYHDFILEDAASPKCIMKEKKKPGETFFMCSCSSDECNDNIIFSEEYNTSNPDLLLVIFQ

SEQ ID NO: 40 - protein, 120 aa, Homo sapiens
MMTGTIETTGNISAEKGGSIILQCHLSSTTAQVTQVNWEQQDQLLAICNADLGWHISPSFKDRVAPGPGLGLTLQSLTVNDTGEYFCIYHTYPDGTYTGRIFLEVLESSVAEHGARFQIP

SEQ ID NO: 41 - protein, 181 aa, Homo sapiens
SEVEYRAEVGQNAYLPCFYTPAAPGNLVPVCWGKGACPVFECGNVVLRTDERDVNYWTSRYWLNGDFRKGDVSLTIENVTLADSGIYCCRIQIPGIMNDEKFNLKLVIKPAKVTPAPTRQRDFTAAFPRMLTTRGHGPAETQTLGSLPDINLTQISTLANELRDSRLANDLRDSGATIRIG

SEQ ID NO: 42 - protein, 10 aa, Homo sapiens
MAVFKTTLWR

SEQ ID NO: 43 - protein, 45 aa, Homo sapiens
MDQQAIYAELNLPTDSGPESSSPSSLPRDVCQGSPWHQFALKLSC

SEQ ID NO: 44 - protein, 38 aa, Homo sapiens
MTDSVIYSMLELPTATQAQNDYGPQQKSSSSRPSCSCL

SEQ ID NO: 45 - protein, 70 aa, Homo sapiens
MDNQGVIYSDLNLPPNPKRQQRKPKGNKNSILATEQEITYAELNLQKASQDFQGNDKTYHCKDLPSAPEK

SEQ ID NO: 46 - protein, 144 aa, Homo sapiens; identical to SEQ ID NO: 39

SEQ ID NO: 47 - protein, 93 aa, Homo sapiens; identical to SEQ ID NO: 38

SEQ ID NO: 48 - protein, 24 aa, Homo sapiens
LCARPRRSPAQEDGKVYINMPGRG

SEQ ID NO: 49 - protein, 126 aa, Homo sapiens
HWKHRVATRFTLPRFLQRRSSRRKVCTKTFLGPRIIGLRHEISVETQDHKSAVRGNNTHDNYENVEAGPPKAKGKTDKELYENTGQSNFEEHIYGNETSSDYYNFQKPRPSEVPQDEDIYILPDSY

SEQ ID NO: 50 - protein, 52 aa, Homo sapiens
YFLGRLVPRGRGAAEAATRKQRITETESPYQELQGQRSDVYSDLNTQRPYYK

SEQ ID NO: 51 - protein, 42 aa, Homo sapiens
RLKIQVRKAAITSYEKSDGVYTGLSTRNQETYETLKHEKPPQ

SEQ ID NO: 52 - protein, 61 aa, Homo sapiens
RKELKRKKKWDLEISLDSGHEKKVISSLQEDRHLEEELKCQEQKEEQLQEGVHRKEPQGAT

SEQ ID NO: 53 - protein, 77 aa, Homo sapiens
CRKKRISANSTDPVKAAQFEPPGRQMIAIRKRQLEETNNDYETADGGYMTLNPRAPTDDDKNIYLTLPPNDHVNSNN

SEQ ID NO: 54 - protein, 77 aa, Homo sapiens
CRKKRISANSTDPVKAAQFEPPGRQMIAIRKRQPEETNNDYETADGGYMTLNPRAPTDDDKNIYLTLPPNDHVNSNN

SEQ ID NO: 55 - protein, 25 aa, Homo sapiens
KTNIRSSTRDWKDHKFKWRKDPQDK

SEQ ID NO: 56 - protein, 41 aa, Homo sapiens
ENWHSHTALNKEASADVAEPSWSQQMCQPGLTFARTPSVCK

SEQ ID NO: 57 - protein, 12 aa, Homo sapiens
KCDRKPDRTNSN

SEQ ID NO: 58 - protein, 120 aa, Homo sapiens
WRRKRKEKQSETSPKEFLTIYEDVKDLKTRRNHEQEQTFPGGGSTIYSMIQSQSSAPTSQEPAYTLYSLIQPSRKSGSRKRNHSPSFNSTIYEVIGKSQPKAQNPARLSRKELENFDVYS

SEQ ID NO: 59 - protein, 77 aa, Homo sapiens
QLRRRGKTNHYQTTVEKKSLTIYAQVQKPGPLQKKLDSFPAQDPCTTIYVAATEPVPESVQETNSITVYASVTLPES

SEQ ID NO: 60 - protein, 99 aa, Homo sapiens
RLFKRRQGRIFPEGSCLNTFTKNPYAASKKTIYTYIMASRNTQPAESRIYDEILQSKVLPSKEEPVNTVYSEVQFADKMGKASTQDSKPPGTSSYEIVI

SEQ ID NO: 61 - protein, 84 aa, Homo sapiens
LRKRRDSLSLSTQRTQGPAESARNLEYVSVSPTNNTVYASVTHSNRETEIWTPRENDTITIYSTINHSKESKPTFSRATALDNV

SEQ ID NO: 62 - protein, 88 aa, Homo sapiens
WFLKRERQEEYIEEKKRVDICRETPNICPHSGENTEYDTIPHTNRTILKEDPANTVYSTVEIPKKMENPHSLLTMPDTPRLFAYENVI

SEQ ID NO: 63 - protein, 116 aa, Homo sapiens
KRKKQRSRRNDEELETRAHRVATEERGRKPHQIPASTPQNPATSQHPPPPPGHRSQAPSHRPPPPGHRVQHQPQKRPPAPSGTQVHQQKGPPLPRPRVQPKPPHGAAENSLSPSSN

SEQ ID NO: 64 - protein, 179 aa, Homo sapiens
KRKGRCSVPAFCSSQAEAPADTPEPTAGHTLYSVLSQGYEKLDTPLRPARQQPTPTSDSSSDSNLTTEEDEDRPEVHKPISGRYEVFDQVTQEGAGHDPAPEGQADYDPVTPYVTEVESVVGENTMYAQVFNLQGKTPVSQKEESSATIYCSIRKPQVVPPPQQNDLEIPESPTYENFT

SEQ ID NO: 65 - protein, 55 aa, Homo sapiens
KNRKAKAKPVTRGAGAGGRQRGQNKERPPPVPNPDYEPIRKGQRDLYSGLNQRRI

SEQ ID NO: 66 - protein, 45 aa, Homo sapiens
GQDGVRQSRASDKQTLLPNDQLYQPLKDREDDQYSHLQGNQLRRN

SEQ ID NO: 67 - protein, 113 aa, Homo sapiens
RVKFSRSADAPAYQQGQNQLYNELNLGRREEYDVLDKRRGRDPEMGGKPQRRKNPQEGLYNELQKDKMAEAYSEIGMKGERRRGKGHDGLYQGLSTATKDTYDALHMQALPPR

SEQ ID NO: 68 - protein, 76 aa, Homo sapiens
AKTGRTSIQRDLKEQQPQALAPGRGPSHSSAFSMSPLSTAQAPLPNPRTAASIYEELLKHDTNIYCRMDHKAEVAS

SEQ ID NO: 69 - protein, 43 aa, Homo sapiens
KHRKGNNAHENPKEVAIHLHSQGGSSVHPRTLQTNEENSRVLP

SEQ ID NO: 70 - protein, 26 aa, Homo sapiens
RYLQRRKKKGTYLTDETHREVKFTSL

SEQ ID NO: 71 - protein, 46 aa, Homo sapiens
YKKRRVHLPQEGAFENTLYFNSQSSPGTSDMKDLVGNIEQNEHSVI

SEQ ID NO: 72 - protein, 437 aa, Homo sapiens
RFCGIYGYRLRRKWEEKIPNPSKSHLFQNGSAELWPPGSMSAFTSGSPPHQGPWGSRFPELEGVFPVGFGDSEVSPLTIEDPKHVCDPPSGPDTTPAASDLPTEQPPSPQPGPPAASHTPEKQASSFDFNGPYLGPPHSRSLPDILGQPEPPQEGGSQKSPPPGSLEYLCLPAGGQVQLVPLAQAMGPGQAVEVERRPSQGAAGSPSLESGGGPAPPALGPRVGGQDQKDSPVAIPMSSGDTEDPGVASGYVSSADLVFTPNSGASSVSLVPSLGLPSDQTPSLCPGLASGPPGAPGPVKSGFEGYVELPPIEGRSPRSPRNNPVPPEAKSPVLNPGERPADVSPTSPQPEGLLVLQQVGDYCFLPGLGPGPLSLRSKPSSPGPGPEIKNLDQAFQVKKPPGQAVPQVPVIQLFKALKQQDYLSLPPWEVNKPGEVC

SEQ ID NO: 73 - protein, 86 aa, Homo sapiens
ERTMPRIPTLKNLEDLVTEYHGNFSAWSGVSKGLAESLQPDYSERLCLVSEIPPKGGALGEGPGASPCNQHSPYWAPPCYTLKPET

SEQ ID NO: 74 - protein, 119 aa, Homo sapiens
KLWRVKKFLIPSVPDPKSIFPGLFEIHQGNFQEWITDTQNVAHLHKMAGAEQESGPEEPLVVQLAKTEAESPRMLDPQTEEKEASGGSLQLPHQPLQGGDVVTIGGFTFVMNDRSYVAL

SEQ ID NO: 75 - protein, 235 aa, Homo sapiens
HRRALKQKIWPGIPSPESEFEGLFTTHKGNFQLWLYQNDGCLWWSPCTPFTEDPPASLEVLSERCWGTMQAVEPGTDDEGPLLEPVGSEHAQDTYLVLDKWLLPRNPPSEDLPGPGGSVDIVAMDEGSEASSCSSALASKPSPEGASAASFEYTILDPSSQLLRPWTLCPELPPTPPHLKYLYLVVSDSGISTDYSSGDSQGAQGGLSDGPYSNPYENSLIPAAEPLPPSYVACS

SEQ ID NO: 76 - protein, 186 aa, Homo sapiens
SPNRKNPLWPSVPDPAHSSLGSWVPTIMEEDAFQLPGLGTPPITKLTVLEEDEKKPVPWESHNSSETCGLPTLVQTYVLQGDPRAVSTQPQSQSGTSDQVLYGQLLGSPTSPGPGHYLRCDSTQPLLAGLTPSPKSYENLWFQASPLGTLVTPAPSQEDDCVFGPLLNFPLLQGIRVHGMEALGSF

SEQ ID NO: 77 - protein, 54 aa, Homo sapiens
KRFLRIQRLFPPVPQIKDKLNDNHEVEDEIIWEEFTPEEGKGYREEVLTVKEIT

SEQ ID NO: 78 - protein, 100 aa, Homo sapiens
KVFLRCINYVFFPSLKPSSSIDEYFSEQPLKNLLLSTSEEQIEKCFIIENISTIATVEETNQTDEDHKKYSSQTSQDSGNYSNEDESESKTSEELQQDFV

SEQ ID NO: 79 - protein, 251 aa, Homo sapiens
KWIGYICLRNSLPKVLNFHNFLAWPFPNLPPLEAMDMVEVIYINRKKKVWDYNYDDESDSDTEAAPRTSGGGYTMHGLTVRPLGQASATSTESQLIDPESEEEPDLPEVDVELPTMPKDSPQQLELLSGPCERRKSPLQDPFPEEDYSSTEGSGGRITFNVDLNSVFLRVLDDEDSDDLEAPLMLSSHLEEMVDPEDPDNVQSNHLLASGEGTQPTFPSPSSEGLWSEDAPSDQSDTSESDVDLGDGYIMR

SEQ ID NO: 80 - protein, 271 aa, Homo sapiens
KTLMGNPWFQRAKMPRALDFSGHTHPVATFQPSRPESVNDLFLCPQKELTRGVRPTPRVRAPATQQTRWKKDLAEDEEEEDEEDTEDGVSFQPYIEPPSFLGQEHQAPGHSEAGGVDSGRPRAPLVPSEGSSAWDSSDRSWASTVDSSWDRAGSSGYLAEKGPGQGPGGDGHQESLPPPEFSKDSGFLEELPEDNLSSWATWGTLPPEPNLVPGGPPVSLQTLTFCWESSPEEEEEARESEIEDSDAGSWGAESTQRTEDRGRTLGHYMAR

SEQ ID NO: 81 - protein, 182 aa, Homo sapiens
YRAHFGTDETILDGKEYDIYVSYARNAEEEEFVLLTLRGVLENEFGYKLCIFDRDSLPGGIVTDETLSFIQKSRRLLVVLSPNYVLQGTQALLELKAGLENMASRGNINVILVQYKAVKETKVKELKRAKTVLTVIKWKGEKSKYPQGRFWKQLQVAMPVKKSPRRSSSDEQGLSYSSLKNV

SEQ ID NO: 82 - protein, 213 aa, Homo sapiens
KIFKIDIVLWYRDSCYDFLPIKASDGKTYDAYILYPKTVGEGSTSDCDIFVFKVLPEVLEKQCGYKLFIYGRDDYVGEDIVEVINENVKKSRRLIIILVRETSGFSWLGGSSEEQIAMYNALVQDGIKVVLLELEKIQDYEKMPESIKFIKQKHGAIRWSGDFTQGPQSAKTRFWKNVRYHMPVQRRSPSSKHQLLSPATKEKLQREAHVPLG

SEQ ID NO: 83 - protein, 207 aa, Homo sapiens
LKMFWIEATLLWRDIAKPYKTRNDGKLYDAYVVYPRNYKSSTDGASRVEHFVHQILPDVLENKCGYTLCIYGRDMLPGEDVVTAVETNIRKSRRHIFILTPQITHNKEFAYEQEVALHCALIQNDAKVILIEMEALSELDMLQAEALQDSLQHLMKVQGTIKWREDHIANKRSLNSKFWKHVRYQMPVPSKIPRKASSLTPLAAQKQ

SEQ ID NO: 84 - protein, 219 aa, Homo sapiens
NIFKIDIVLWYRSAFHSTETIVDGKLYDAYVLYPKPHKESQRHAVDALVLNILPEVLERQCGYKLFIFGRDEFPGQAVANVIDENVKLCRRLIVIVVPESLGFGLLKNLSEEQIAVYSALIQDGMKVILIELEKIEDYTVMPESIQYIKQKHGAIRWHGDFTEQSQCMKTKFWKTVRYHMPPRRCRPFPPVQLLQHTPCYRTAGPELGSRRKKCTLTTG

SEQ ID NO: 85 - protein, 31 aa, Homo sapiens
RLRRGGKDGSPKPGFLASVIPVDRRPGAPNL

SEQ ID NO: 86 - protein, 92 aa, Homo sapiens
NRAARHLCPPLPTPCASSAIEFPGGKETWQWINPVDFQEEASLQEALVVEMSWDKGERTEPLEKTELPEGAPELALDTELSLEDGDRCKAKM

SEQ ID NO: 87 - protein, 219 aa, Homo sapiens
HYFQQKVFVLLAALRPQWCSREIPDPANSTCAKKYPIAEEKTQLPLDRLLIDWPTPEDPEPLVISEVLHQVTPVFRHPPCSNWPQREKGIQGHQASEKDMMHSASSPPPPRALQAESRQLVDLYKVLESRGSDPKPENPACPWTVLPAGDLPTHDGYLPSNIDDLPSHEAPLADSLEELEPQHISLSVFPSSSLHPLTFSCGDKLTLDQLKMRCDSLML

SEQ ID NO: 88 - protein, 525 aa, Homo sapiens
CMTWRLAGPGSEKYSDDTKYTDGLPAADLIPPPLKPRKVWIIYSADHPLYVDVVLKFAQFLLTACGTEVALDLLEEQAISEAGVMTWVGRQKQEMVESNSKIIVLCSRGTRAKWQALLGRGAPVRLRCDHGKPVGDLFTAAMNMILPDFKRPACFGTYVVCYFSEVSCDGDVPDLFGAAPRYPLMDRFEEVYFRIQDLEMFQPGRMHRVGELSGDNYLRSPGGRQLRAALDRFRDWQVRCPDWFECENLYSADDQDAPSLDEEVFEEPLLPPGTGIVKRAPLVREPGSQACLAIDPLVGEEGGAAVAKLEPHLQPRGQPAPQPLHTLVLAAEEGALVAAVEPGPLADGAAVRLALAGEGEACPLLGSPGAGRNSVLFLPVDPEDSPLGSSTPMASPDLLPEDVREHLEGLMLSLFEQSLSCQAQGGCSRPAMVLTDPHTPYEEEQRQSVQSDQGYISRSSPQPPEGLTEMEEEEEEEQDPGKPALPLSPEDLESLRSLQRQLLFRQLQKNSGWDTMGSESEGPSA

SEQ ID NO: 89 - protein, 189 aa, Homo sapiens
RHERIKKTSFSTTTLLPPIKVLVVYPSEICFHHTICYFTEFLQNHCRSEVILEKWQKKKIAEMGPVQWLATQKKAADKVVFLLSNDVNSVCDGTCGKSEGSPSENSQDLFPLAFNLFCSDLRSQIHLHKYVVVYFREIDTKDDYNALSVCPKYHLMKDATAFCAELLHVKQQVSAGKRSQACHDGCCSL

SEQ ID NO: 90 - protein, 232 aa, Homo sapiens
KKDHAKGWLRLLKQDVRSGAAARGRAALLLYSADDSGFERLVGALASALCQLPLRVAVDLWSRRELSAQGPVAWFHAQRRQTLQEGGVVVLLFSPGAVALCSEWLQDGVSGPGAHGPHDAFRASLSCVLPDFLQGRAPGSYVGACFDRLLHPDAVPALFRTVPVFTLPSQLPDFLGALQQPRAPRSGRLQERAEQVSRALQPALDSYFHPPGTPAPGRGVGPGAGPGAGDGT

SEQ ID NO: 91 - protein, 192 aa, Homo sapiens
TCRRPQSGPGPARPVLLLHAADSEAQRRLVGALAELLRAALGGGRDVIVDLWEGRHVARVGPLPWLWAARTRVAREQGTVLLLWSGADLRPVSGPDPRAAPLLALLHAAPRPLLLLAYFSRLCAKGDIPPPLRALPRYRLLRDLPRLLRALDARPFAEATSWGRLGARQRRQSRLELCSRLEREAARLADLG

SEQ ID NO: 92 - protein, 191 aa, Homo sapiens
YRVDLVLFYRHLTRRDETLTDGKTYDAFVSYLKECRPENGEEHTFAVEILPRVLEKHFGYKLCIFERDVVPGGAVVDEIHSLIEKSRRLIIVLSKSYMSNEVRYELESGLHEALVERKIKIILIEFTPVTDFTFLPQSLKLLKSHRVLKWKADKSLSYNSRFWKNLLYLMPAKTVKPGRDEPEVLPVLSES

SEQ ID NO: 93 - protein, 222 aa, Homo sapiens
SALLYRHWIEIVLLYRTYQSKDQTLGDKKDFDAFVSYAKWSSFPSEATSSLSEEHLALSLFPDVLENKYGYSLCLLERDVAPGGVYAEDIVSIIKRSRRGIFILSPNYVNGPSIFELQAAVNLALDDQTLKLILIKFCYFQEPESLPHLVKKALRVLPTVTWRGLKSVPPNSRFWAKMRYHMPVKNSQGFTWNQLRITSRIFQWKGLSRTETTGRSSQPKEW

SEQ ID NO: 94 - protein, 286 aa, Homo sapiens
NCRNTGPWLKKVLKCNTPDPSKFFSQLSSEHGGDVQKWLSSPFPSSSFSPGGLAPEISPLEVLERDKVTQLLLQQDKVPEPASLSSNHSLTSCFTNQGYFFFHLPDALEIEACQVYFTYDPYSEEDPDEGVAGAPTGSSPQPLQPLSGEDDAYCTFPSRDDLLLFSPSLLGGPSPPSTAPGGSGAGEERMPPSLQERVPRDWDPQPLGPPTPGVPDLVDFQPPPELVLREAGEEVPDAGPREGVSFPWSRPPGQGEFRALNARLPLNTDAYLSLQELQGQDPTHLV

SEQ ID NO: 95 - protein, 285 aa, Homo sapiens
SLKTHPLWRLWKKIWAVPSPERFFMPLYKGCSGDFKKWVGAPFTGSSLELGPWSPEVPSTLEVYSCHPPRSPAKRLQLTELQEPAELVESDGVPKPSFWPTAQNSGGSAYSEERDRPYGLVSIDTVTVLDAEGPCTWPCSCEDDGYPALDLDAGLEPSPGLEDPLLDAGTTVLSCGCVSAGSPGLGGPLGSLLDRLKPPLADGEDWAGGLPWGGRSPGGVSESEAGSPLAGLDMDTFDSGFVGSDCSSPVECDFTSPGDEGPPRSYLRQWVVIPPPLSSPGPQAS

SEQ ID NO: 96 - protein, 325 aa, Homo sapiens
SYRYVTKPPAPPNSLNVQRVLTFQPLRFIQEHVLIPVFDLSGPSSLAQPVQYSQIRVSGPREPAGAPQRHSLSEITYLGQPDISILQPSNVPPPQILSPLSYAPNAAPEVGPPSYAPQVTPEAQFPFYAPQAISKVQPSSYAPQATPDSWPPSYGVCMEGSGKDSPTGTLSSPKHLRPKGQLQKEPPAGSCMLGGLSLQEVTSLAMEESQEAKSLHQPLGICTDRTSDPNVLHSGEEGTPQYLKGQLPLLSSVQIEGHPMSLPLQPPSRPCSPSDQGPSPWGLLESLVCPKDEAKSPAPETSDLEQPTELDSLFRGLALTVQWES

SEQ ID NO: 97 - protein, 253 aa, Homo sapiens
NRSFRTGIKRRILLLIPKWLYEDIPNMKNSNVVKMLQENSELMNNNSSEQVLYVDPMITEIKEIFIPEHKPTDYKKENTGPLETRDYPQNSLFDNTTVVYIPDLNTGYKPQISNFLPEGSHLSNNNEITSLTLKPPVDSLDSGNNPRLQKHPNFAFSVSSVNSLSNTIFLGELSLILNQGECSSPDIQNSVEEETTMLLENDSPSETIPEQTLLPDEFVSCLGIVNEELPSINTYFPQNILESHFNRISLLEK

SEQ ID NO: 98 - protein, 99 aa, Homo sapiens
TSGRCYHLRHKVLPRWVWEKVPDPANSSSGQPHMEQVPEAQPLGDLPILEVEEMEPPPVMESSQPAQATAPLDSGYEKHFLPTPEELGLLGPPRPQVLA

SEQ ID NO: 99 - protein, 53 aa, Homo sapiens
RRYLVMQRLFPRIPHMKDPIGDSFQNDKLVVWEAGKAGLEECLVTEVQVVQKT

SEQ ID NO: 100 - protein, 277 aa, Homo sapiens
NKRDLIKKHIWPNVPDPSKSHIAQWSPHTPPRHNFNSKDQMYSDGNFTDVSVVEIEANDKKPFPEDLKSLDLFKKEKINTEGHSSGIGGSSCMSSSRPSISSSDENESSQNTSSTVQYSTVVHSGYRHQVPSVQVFSRSESTQPLLDSEERPEDLQLVDHVDGGDGILPRQQYFKQNCSQHESSPDISHFERSKQVSSVNEEDFVRLKQQISDHISQSCGSGQMKMFQEVSAADAFGPGTEGQVERFETVGMEAATDEGMPKSYLPQTVRQGGYMPQ

SEQ ID NO: 101 - protein, 195 aa, Homo sapiens
KKRIKPIVWPSLPDHKKTLEHLCKKPRKNLNVSFNPESFLDCQIHRVDDIQARDEVEGFLQDTFPQQLEESEKQRLGGDVQSPNCPSEDVVITPESFGRDSSLTCLAGNVSACDAPILSSSRSLDCRESGKNGPHVYQDLLLSLGTTNSTLPPPFSLQSGILTLNPVAQGQPILTSLGSNQEEAYVTMSSFYQNQ

SEQ ID NO: 102 - protein, 239 aa, Homo sapiens
YRKREWIKETFYPDIPNPENCKALQFQKSVCEGSSALKTLEMNPCTPNNVEVLETRSAFPKIEDTEIISPVAERPEDRSDAEPENHVVVSYCPPIIEEEIPNPAADEAGGTAQVIYIDVQSMYQPQAKPEEEQENDPVGGAGYKPQMHLPINSTVEDIAAEEDLDKTAGYRPQANVNTWNLVSPDSPRSIDSNSEIVSFGSPCSINSRQFLIPPKDEDSPKSNGGGWSFTNFFQNKPND

SEQ ID NO: 103 - protein, 434 aa, Homo sapiens
KYKQKPKYQVRWKIIESYEGNSYTFIDPTQLPYNEKWEFPRNNLQFGKTLGAGAFGKVVEATAFGLGKEDAVLKVAVKMLKSTAHADEKEALMSELKIMSHLGQHENIVNLLGACTHGGPVLVITEYCCYGDLLNFLRRKAEAMLGPSLSPGQDPEGGVDYKNIHLEKKYVRRDSGFSSQGVDTYVEMRPVSTSSNDSFSEQDLDKEDGRPLELRDLLHFSSQVAQGMAFLASKNCIHRDVAARNVLLTNGHVAKIGDFGLARDIMNDSNYIVKGNARLPVKWMAPESIFDCVYTVQSDVWSYGILLWEIFSLGLNPYPGILVNSKFYKLVKDGYQMAQPAFAPKNIYSIMQACWALEPTHRPTFQQICSFLQEQAQEDRRERDYTNLPSSSRSGGSGSSSSELEEESSSEHLTCCEQGDIAQPLLQPNNYQFC

SEQ ID NO: 104 - protein, 218 aa, Homo sapiens
KSQWIKETCYPDIPDPYKSSILSLIKFKENPHLIIMNVSDCIPDAIEVVSKPEGTKIQFLGTRKSLTETELTKPNYLYLLPTEKNHSGPGPCICFENLTYNQAASDSGSCGHVPVSPKAPSMLGLMTSPENVLKALEKNYMNSLGEIPAGETSLNYVSQLASPMFGDKDSLPTNPVEAPHCSEYKMQMAVSLRLALPPPTENSSLSSITLLDPGEHYC

SEQ ID NO: 105 - protein, 542 aa, Homo sapiens
RRRHIVRKRTLRRLLQERELVEPLTPSGEAPNQALLRILKETEFKKIKVLGSGAFGTVYKGLWIPEGEKVKIPVAIKELREATSPKANKEILDEAYVMASVDNPHVCRLLGICLTSTVQLITQLMPFGCLLDYVREHKDNIGSQYLLNWCVQIAKGMNYLEDRRLVHRDLAARNVLVKTPQHVKITDFGLAKLLGAEEKEYHAEGGKVPIKWMALESILHRIYTHQSDVWSYGVTVWELMTFGSKPYDGIPASEISSILEKGERLPQPPICTIDVYMIMVKCWMIDADSRPKFRELIIEFSKMARDPQRYLVIQGDERMHLPSPTDSNFYRALMDEEDMDDVVDADEYLIPQQGFFSSPSTSRTPLLSSLSATSNNSTVACIDRNGLQSCPIKEDSFLQRYSSDPTGALTEDSIDDTFLPVPEYINQSVPKRPAGSVQNPVYHNQPLNPAPSRDPHYQDPHSTAVGNPEYLNTVQPTCVNSTFDSPAHWAQKGSHQISLDNPDYQQDFFPKEAKPNGIFKGSTAENAEYLRVAPQSSEFIGA

SEQ ID NO: 106 - protein, 350 aa, Homo sapiens
KQQRIKMLILPPVPVPKIKGIDPDLLKEGKLEEVNTILAIHDSYKPEFHSDDSWVEFIELDIDEPDEKTEESDTDRLLSSDHEKSHSNLGVKDGDSGRTSCCEPDILETDFNANDIHEGTSEVAQPQRLKGEADLLCLDQKNQNNSPYHDACPATQQPSVIQAEKNKPQPLPTEGAESTHQAAHIQLSNPSSLSNIDFYAQVSDITPAGSVVLSPGQKNKAGMSQCDMHPEMVSLCQENFLMDNAYFCEADAKKCIPVAPHIKVESHIQPSLNQEDIYITTESLTTAAGRPGTGEHVPGSEMPVPDYTSIHIVQSPQGLILNATALPLPDKEFLSSCGYVSTDQLNKIMP

SEQ ID NO: 107 - protein, 403 aa, Homo sapiens
RKRQPDGPLGPLYASSNPEYLSASDVFPCSVYVPDEWEVSREKITLLRELGQGSFGMVYEGNARDIIKGEAETRVAVKTVNESASLRERIEFLNEASVMKGFTCHHVVRLLGVVSKGQPTLVVMELMAHGDLKSYLRSLRPEAENNPGRPPPTLQEMIQMAAEIADGMAYLNAKKFVHRDLAARNCMVAHDFTVKIGDFGMTRDIYETDYYRKGGKGLLPVRWMAPESLKDGVFTTSSDMWSFGVVLWEITSLAEQPYQGLSNEQVLKFVMDGGYLDQPDNCPERVTDLMRMCWQFNPKMRPTFLEIVNLLKDDLHPSFPEVSFFHSEENKAPESEELEMEFEDMENVPLDRSSHCQREEAGGRDGGSSLGFKRSYEEHIPYTHMNGGKKNGRILTLPRSNPS

SEQ ID NO: 108 - protein, 303 aa, Homo sapiens
SHQRMKKLFWEDVPNPKNCSWAQGLNFQKPETFEHLFIKHTASVTCGPLLLEPETISEDISVDTSWKNKDEMMPTTVVSLLSTTDLEKGSVCISDQFNSVNFSEAEGTEVTYEDESQRQPFVKYATLISNSKPSETGEEQGLINSSVTKCFSSKNSPLKDSFSNSSWEIEAQAFFILSDQHPNIISPHLTFSEGLDELLKLEGNFPEENNDKKSIYYLGVTSIKKRESGVLLTDKSRVSCPFPAPCLFTDIRVLQDSCSHFVENNINLGTSSKKTFASYMPQFQTCSTQTHKIMENKMCDLTV

SEQ ID NO: 109 - protein, 364 aa, Homo sapiens
KGYSMVTCIFPPVPGPKIKGFDAHLLEKGKSEELLSALGCQDFPPTSDYEDLLVEYLEVDDSEDQHLMSVHSKEHPSQGMKPTYLDPDTDSGRGSCDSPSLLSEKCEEPQANPSTFYDPEVIEKPENPETTHTWDPQCISMEGKIPYFHAGGSKCSTWPLPQPSQHNPRSSYHNITDVCELAVGPAGAPATLLNEAGKDALKSSQTIKSREEGKATQQREVESFHSETDQDTPWLLPQEKTPFGSAKPLDYVEIHKVNKDGALSLLPKQRENSGKPKKPGTPENNKEYAKVSGVMDNNILVLVPDPHAKNVACFEESAKEAPPSLEQNQAEKALANFTATSSKCRLQLGGLDYLDPACFTHSFH

SEQ ID NO: 110 - protein, 122 aa, Homo sapiens
RWQFPAHYRRLRHALWPSLPDLHRVLGQYLRDTAALSPPKATVSDTCEEVEPSLLEILPKSSERTPLPLCSSQAQMDYRRLQPSCLGTMPLSVCPPMAESGSCCTTHIANHSYLPLSYWQQP

SEQ ID NO: 111 - protein, 542 aa, Homo sapiens; identical to SEQ ID NO: 105

SEQ ID NO: 112 - protein, 580 aa, Homo sapiens
KRRQQKIRKYTMRRLLQETELVEPLTPSGAMPNQAQMRILKETELRKVKVLGSGAFGTVYKGIWIPDGENVKIPVAIKVLRENTSPKANKEILDEAYVMAGVGSPYVSRLLGICLTSTVQLVTQLMPYGCLLDHVRENRGRLGSQDLLNWCMQIAKGMSYLEDVRLVHRDLAARNVLVKSPNHVKITDFGLARLLDIDETEYHADGGKVPIKWMALESILRRRFTHQSDVWSYGVTVWELMTFGAKPYDGIPAREIPDLLEKGERLPQPPICTIDVYMIMVKCWMIDSECRPRFRELVSEFSRMARDPQRFVVIQNEDLGPASPLDSTFYRSLLEDDDMGDLVDAEEYLVPQQGFFCPDPAPGAGGMVHHRHRSSSTRSGGGDLTLGLEPSEEEAPRSPLAPSEGAGSDVFDGDLGMGAAKGLQSLPTHDPSPLQRYSEDPTVPLPSETDGYVAPLTCSPQPEYVNQPDVRPQPPSPREGPLPAARPAGATLERPKTLSPGKNGVVKDVFAFGGAVENPEYLTPQGGAAPQPHPPPAFSPAFDNLYYWDQDPPERGAPPSTFKGTPTAENPEYLGLDVPV

SEQ ID NO: 113 - protein, 435 aa, Homo sapiens
KKRKQIKDLGSELVRYDARVHTPHLDRLVSARSVSPTTEMVSNESVDYRATFPEDQFPNSSQNGSCRQVQYPLTDMSPILTSGDSDISSPLLQNTVHIDLSALNPELVQAVQHVVIGPSSLIVHFNEVIGRGHFGCVYHGTLLDNDGKKIHCAVKSLNRITDIGEVSQFLTEGIIMKDFSHPNVLSLLGICLRSEGSPLVVLPYMKHGDLRNFIRNETHNPTVKDLIGFGLQVAKGMKYLASKKFVHRDLAARNCMLDEKFTVKVADFGLARDMYDKEYYSVHNKTGAKLPVKWMALESLQTQKFTTKSDVWSFGVLLWELMTRGAPPYPDVNTFDITVYLLQGRRLLQPEYCPDPLYEVMLKCWHPKAEMRPSFSELVSRISAIFSTFIGEHYVHVNATYVNVKCVAPYPSLLSSEDNADDEVDTRPASFWETS

SEQ ID NO: 114 - protein, 425 aa, Homo sapiens
KMKSGTKKSDFHSQMAVHKLAKSIPLRRQVTVSADSSASMNSGVLLVRPSRLSSSGTPMLAGVSEYELPEDPRWELPRDRLVLGKPLGEGCFGQVVLAEAIGLDKDKPNRVTKVAVKMLKSDATEKDLSDLISEMEMMKMIGKHKNIINLLGACTQDGPLYVIVEYASKGNLREYLQARRPPGLEYCYNPSHNPEEQLSSKDLVSCAYQVARGMEYLASKKCIHRDLAARNVLVTEDNVMKIADFGLARDIHHIDYYKKTTNGRLPVKWMAPEALFDRIYTHQSDVWSFGVLLWEIFTLGGSPYPGVPVEELFKLLKEGHRMDKPSNCTNELYMMMRDCWHAVPSQRPTFKQLVEDLDRIVALTSNQEYLDLSMPLDQYSPSFPDTRSSTCSSGEDSVFSHEPLPEEPCLPRHPAQLANGGLKRR

SEQ ID NO: 115 - protein, 423 aa, Homo sapiens
RMKNTTKKPDFSSQPAVHKLTKRIPLRRQVTVSAESSSSMNSNTPLVRITTRLSSTADTPMLAGVSEYELPEDPKWEFPRDKLTLGKPLGEGCFGQVVMAEAVGIDKDKPKEAVTVAVKMLKDDATEKDLSDLVSEMEMMKMIGKHKNIINLLGACTQDGPLYVIVEYASKGNLREYLRARRPPGMEYSYDINRVPEEQMTFKDLVSCTYQLARGMEYLASQKCIHRDLAARNVLVTENNVMKIADFGLARDINNIDYYKKTTNGRLPVKWMAPEALFDRVYTHQSDVWSFGVLMWEIFTLGGSPYPGIPVEELFKLLKEGHRMDKPANCTNELYMMMRDCWHAVPSQRPTFKQLVEDLDRILTLTTNEEYLDLSQPLEQYSPSYPDTRSSCSSGDDSVFSPDPMPYEPCLPQYPHINGSVKT

SEQ ID NO: 116 - protein, 410 aa, Homo sapiens
RLRSPPKKGLGSPTVHKISRFPLKRQVSLESNASMSSNTPLVRIARLSSGEGPTLANVSELELPADPKWELSRARLTLGKPLGEGCFGQVVMAEAIGIDKDRAAKPVTVAVKMLKDDATDKDLSDLVSEMEMMKMIGKHKNIINLLGACTQGGPLYVLVEYAAKGNLREFLRARRPPGLDYSFDTCKPPEEQLTFKDLVSCAYQVARGMEYLASQKCIHRDLAARNVLVTEDNVMKIADFGLARDVHNLDYYKKTTNGRLPVKWMAPEALFDRVYTHQSDVWSFGVLLWEIFTLGGSPYPGIPVEELFKLLKEGHRMDKPANCTHDLYMIMRECWHAAPSQRPTFKQLVEDLDRVLTVTSTDEYLDLSAPFEQYSPGGQDTPSSSSSGDDSVFAHDLLPPAPPSSGGSRT

SEQ ID NO: 117 - protein, 412 aa, Homo sapiens
RGQALHGRHPRPPATVQKLSRFPLARQFSLESGSSGKSSSSLVRGVRLSSSGPALLAGLVSLDLPLDPLWEFPRDRLVLGKPLGEGCFGQVVRAEAFGMDPARPDQASTVAVKMLKDNASDKDLADLVSEMEVMKLIGRHKNIINLLGVCTQEGPLYVIVECAAKGNLREFLRARRPPGPDLSPDGPRSSEGPLSFPVLVSCAYQVARGMQYLESRKCIHRDLAARNVLVTEDNVMKIADFGLARGVHHIDYYKKTSNGRLPVKWMAPEALFDRVYTHQSDVWSFGILLWEIFTLGGSPYPGIPVEELFSLLREGHRMDRPPHCPPELYGLMRECWHAAPSQRPTFKQLVEALDKVLLAVSEEYLDLRLTFGPYSPSGGDASSTCSSSDSVFSHDPLPLGSSSFPFGSGVQT

SEQ ID NO: 118 - protein, 571 aa, Homo sapiens
LRTVKRANGGELKTGYLSIVMDPDELPLDEHCERLPYDASKWEFPRDRLKLGKPLGRGAFGQVIEADAFGIDKTATCRTVAVKMLKEGATHSEHRALMSELKILIHIGHHLNVVNLLGACTKPGGPLMVIVEFCKFGNLSTYLRSKRNEFVPYKTKGARFRQGKDYVGAIPVDLKRRLDSITSSQSSASSGFVEEKSLSDVEEEEAPEDLYKDFLTLEHLICYSFQVAKGMEFLASRKCIHRDLAARNILLSEKNVVKICDFGLARDIYKDPDYVRKGDARLPLKWMAPETIFDRVYTIQSDVWSFGVLLWEIFSLGASPYPGVKIDEEFCRRLKEGTRMRAPDYTTPEMYQTMLDCWHGEPSQRPTFSELVEHLGNLLQANAQQDGKDYIVLPISETLSMEEDSGLSLPTSPVSCMEEEEVCDPKFHYDNTAGISQYLQNSKRKSRPVSVKTFEDIPLEEPEVKVIPDDNQTDSGMVLASEELKTLEDRTKLSPSFGGMVPSKSRESVASEGSNQTSGYQSGYHSDDTDTTVYSSEEAELLKLIEIGVQTGSTAQILQPDSGTTLSSPPV

SEQ ID NO: 119 - protein, 567 aa, Homo sapiens
FCNMRRPAHADIKTGYLSIIMDPGEVPLEEQCEYLSYDASQWEFPRERLHLGRVLGYGAFGKVVEASAFGIHKGSSCDTVAVKMLKEGATASEHRALMSELKILIHIGNHLNVVNLLGACTKPQGPLMVIVEFCKYGNLSNFLRAKRDAFSPCAEKSPEQRGRFRAMVELARLDRRRPGSSDRVLFARFSKTEGGARRASPDQEAEDLWLSPLTMEDLVCYSFQVARGMEFLASRKCIHRDLAARNILLSESDVVKICDFGLARDIYKDPDYVRKGSARLPLKWMAPESIFDKVYTTQSDVWSFGVLLWEIFSLGASPYPGVQINEEFCQRLRDGTRMRAPELATPAIRRIMLNCWSGDPKARPAFSELVEILGDLLQGRGLQEEEEVCMAPRSSQSSEEGSFSQVSTMALHIAQADAEDSPPSLQRHSLAARYYNWVSFPGCLARGAETRGSSRMKTFEEFPMTPTTYKGSVDNQTDSGMVLASEEFEQIESRHRQESGFSCKGPGQNVAVTRAHPDSQGRRRRPERGARGGQVFYNSEYGELSEPSEEDHCSPSARVTFFTDNSY

SEQ ID NO: 120 - protein, 408 aa, Homo sapiens
RSRRAQRQRQQRQRDRATDVDREDKLWLKPYVDLQAYEDPAQGALDFTRELDPAWLMVDTVIGEGEFGEVYRGTLRLPSQDCKTVAIKTLKDTSPGGQWWNFLREATIMGQFSHPHILHLEGVVTKRKPIMIITEFMENGALDAFLREREDQLVPGQLVAMLQGIASGMNYLSNHNYVHRDLAARNILVNQNLCCKVSDFGLTRLLDDFDGTYETQGGKIPIRWTAPEAIAHRIFTTASDVWSFGIVMWEVLSFGDKPYGEMSNQEVMKSIEDGYRLPPPVDCPAPLYELMKNCWAYDRARRPHFQKLQAHLEQLLANPHSLRTIANFDPRMTLRLPSLSGSDGIPYRTVSEWLESIRMKRYILHFHSAGLDTMECVLELTAEDLTQMGITLPGHQKRILCSIQGFKD

SEQ ID NO: 121 - protein, 421 aa, Homo sapiens
SRKRAYSKEAVYSDKLQHYSTGRGSPGMKIYIDPFTYEDPNEAVREFAKEIDVSFVKIEEVIGAGEFGEVYKGRLKLPGKREIYVAIKTLKAGYSEKQRRDFLSEASIMGQFDHPNIIRLEGVVTKSRPVMIITEFMENGALDSFLRQNDGQFTVIQLVGMLRGIAAGMKYLAEMNYVHRDLAARNILVNSNLVCKVSDFGLSRYLQDDTSDPTYTSSLGGKIPVRWTAPEAIAYRKFTSASDVWSYGIVMWEVMSFGERPYWDMSNQDVINAIEQDYRLPPPMDCPAALHQLMLDCWQKDRNSRPRFAEIVNTLDKMIRNPASLKTVATITAVPSQPLLDRSIPDFTAFTTVDDWLSAIKMVQYRDSFLTAGFTSLQLVTQMTSEDLLRIGITLAGHQKKILNSIHSMRVQISQSPTAMA

SEQ ID NO: 122 - protein, 540 aa, Homo sapiens
KQKPRYEIRWRVIESISPDGHEYIYVDPMQLPYDSRWEFPRDGLVLGRVLGSGAFGKVVEGTAYGLSRSQPVMKVAVKMLKPTARSSEKQALMSELKIMTHLGPHLNIVNLLGACTKSGPIYIITEYCFYGDLVNYLHKNRDSFLSHHPEKPKKELDIFGLNPADESTRSYVILSFENNGDYMDMKQADTTQYVPMLERKEVSKYSDIQRSLYDRPASYKKKSMLDSEVKNLLSDDNSEGLTLLDLLSFTYQVARGMEFLASKNCVHRDLAARNVLLAQGKIVKICDFGLARDIMHDSNYVSKGSTFLPVKWMAPESIFDNLYTTLSDVWSYGILLWEIFSLGGTPYPGMMVDSTFYNKIKSGYRMAKPDHATSEVYEIMVKCWNSEPEKRPSFYHLSEIVENLLPGQYKKSYEKIHLDFLKSDHPAVARMRVDSDNAYIGVTYKNEEDKLKDWEGGLDEQRLSADSGYIIPLPDIDPVPEEEDLGKRNRHSSQTSEESAIETGSSSSTFIKREDETIEDIDMMDDIGIDSSDLVEDSFL

SEQ ID NO: 123 - protein, 553 aa, Homo sapiens
MLWQKKPRYEIRWKVIESVSSDGHEYIYVDPMQLPYDSTWELPRDQLVLGRTLGSGAFGQVVEATAHGLSHSQATMKVAVKMLKSTARSSEKQALMSELKIMSHLGPHLNVVNLLGACTKGGPIYIITEYCRYGDLVDYLHRNKHTFLQHHSDKRRPPSAELYSNALPVGLPLPSHVSLTGESDGGYMDMSKDESVDYVPMLDMKGDVKYADIESSNYMAPYDNYVPSAPERTCRATLINESPVLSYMDLVGFSYQVANGMEFLASKNCVHRDLAARNVLICEGKLVKICDFGLARDIMRDSNYISKGSTFLPLKWMAPESIFNSLYTTLSDVWSFGILLWEIFTLGGTPYPELPMNEQFYNAIKRGYRMAQPAHASDEIYEIMQKCWEEKFEIRPPFSQLVLLLERLLGEGYKKKYQQVDEEFLRSDHPAILRSQARLPGFHGLRSPLDTSSVLYTAVQPNEGDNDYIIPLPDPKPEVADEGPLEGSPSLASSTLNEVNTSSTISCDSPLEPQDEPEPEPQLELQVEPEPELEQLPDSGCPAPRAEAEDSFL

SEQ ID NO: 124 - protein, 61 aa, Homo sapiens
RKRWQNEKLGLDAGDEYEDENLYEGLNLDDCSMYEDISRGLQGTYQDVGSLNIGDVQLEKP

SEQ ID NO: 125 - protein, 49 aa, Homo sapiens
LDKDDSKAGMEEDHTYEGLDIDQTATYEDIVTLRTGEVKWSVGEHPGQE

SEQ ID NO: 126 - protein, 52 aa, Homo sapiens
KRAVSTPSNEGAIIFLPPWLFSRRRRLERMSRGREKCYSSPGYPQESSNQFH

SEQ ID NO: 127 - protein, 61 aa, Homo sapiens
NRRRRRERRDLFTESWDTQKAPNNYRSPISTSQPTNQSMDDTREDIYVNYPTFSRRPKTRV

SEQ ID NO: 128 - protein, 39 aa, Homo sapiens
RLQSIFPDFSKAGMERAFLPVTSPNKHLGLVTPHKTELV

SEQ ID NO: 129 - protein, 38 aa, Homo sapiens
CWLTKKKYSSSVHDPNGEYMFMRAVNTAKKSRLTDVTL

SEQ ID NO: 130 - protein, 29 aa, Homo sapiens
NRQRKIKKYRLQQAQKGTPMKPNTQATPP

SEQ ID NO: 131 - protein, 27 aa, Homo sapiens
GQHLRQQRMGTYGVRAAWRRLPQAFRP

SEQ ID NO: 132 - protein, 37 aa, Homo sapiens
REHQRSGSYHVREESTYLPLTSMQPTEAMGEEPSRAE

SEQ ID NO: 133 - protein, 114 aa, Homo sapiens
RWCSKKKDAAVMNQEPAGHRTVNREDSDEQDPQEVTYAQLDHCIFTQRKITGPSQRSKRPSTDTSVCIELPNAEPRALSPAHEHHSQALMGSSRETTALSQTQLASSNVPAAGI

SEQ ID NO: 134 - protein, 40 aa, Homo sapiens
LHRWCSDKKNAAVMDQEPAGNRTVNSEDSDEQDHQEVSYA

SEQ ID NO: 135 - protein, 39 aa, Homo sapiens
HRWCSNKKNAAVMDQEPAGNRTVNSEDSDEQDHQEVSYA

SEQ ID NO: 136 - protein, 40 aa, Homo sapiens
LHRWCSDKKNASVMDQGPAGNRTVNREDSDEQDHQEVSYA

SEQ ID NO: 137 - protein, 39 aa, Homo sapiens
HRWCSDKKNAAVMDQEPAGNRTVNSEDSDEQDHQEVSYA

SEQ ID NO: 138 - protein, 40 aa, Homo sapiens
LHRWCSNKKNASVMDQGPAGNRTVNREDSDEQDHQEVSYA

SEQ ID NO: 139 - protein, 22 aa, Homo sapiens
HRWCSNKKKCCCNGPRACREQK

SEQ ID NO: 140 - protein, 25 aa, Homo sapiens
RKRTRERASRASTWEGRRRLNTQTL

SEQ ID NO: 141 - protein, 63 aa, Homo sapiens
WWGDIWWKTMMELRSLDTQKATCHLQQVTDLPWTSVSSPVEREILYHTVARTKISDDDDEHTL

SEQ ID NO: 142 - protein, 45 aa, Homo sapiens
GSTVYYQGKCLTWKGPRRQLPAVVPAPLPPPCGSSAHLLPPVPGG

SEQ ID NO: 143 - protein, 39 aa, Homo sapiens
RTQIKKLCSWRDKNSAACVVYEDMSHSRCNTLSSPNQYQ

SEQ ID NO: 144 - protein, 40 aa, Homo sapiens
CVRCRHRRRQAERMSQIKRLLSEKKTCQCPHRFQKTCSPI

SEQ ID NO: 145 - protein, 41 aa, Homo sapiens
RSKRSRLLHSDYMNMTPRRPGPTRKHYQPYAPPRDFAAYRS

SEQ ID NO: 146 - protein, 111 aa, Homo sapiens
FWGRRSCQQRDSGNSPGNAFYSNVLYRPRGAPKKSEDCSGEGKDQRGQSIYSTSFPQPAPRQPHLASRPCPSPRPCPSPRPGHPVSMVRVSPRPSPTQQPRPKGFPKVGEE

SEQ ID NO: 147 - protein, 68 aa, Homo sapiens
AFYVQSTACKKGEYNVQEAESSGEAVCLNGAGGGAGGAAGAEGGPEAAGGAAESPAEGEVFAIQLTSA

SEQ ID NO: 148 - protein, 59 aa, Homo sapiens
YKVGFFKRNLKEKMEAGRGVPNGIPAEDSEQLASGQEAGDPGCLKPLHEKDSESGGGKD

SEQ ID NO: 149 - protein, 46 aa, Homo sapiens
KALIHLSDLREYRRFEKEKLKSQWNNDNPLFKSATTTVMNPKFAES

SEQ ID NO: 150 - protein, 85 aa, Homo sapiens
IMKLRKAHVIWKKENEVSEHTLESYRSRSNNEETSSEEKNGQSSHPMRCMNYITKLYSEAKTKRKENVQHSKLEEKHIQVPESIV

SEQ ID NO: 151 - protein, 141 aa, Homo sapiens
KLQRRWKRTQSQQGLQENSSGQSFFVRNKKVRRAPLSEGPHSLGCYNPMMEDGISYTTLRFPEMNIPRTGDAESSEMQRPPPDCDDTVTYSALHKRQVGDYENVIPDFPEDEGIHYSELIQFGVGERPQAQENVDYVILKH

SEQ ID NO: 152 - protein, 15 aa, Homo sapiens
TRCGGPQQSRAERPG

SEQ ID NO: 153 - protein, 44 aa, Homo sapiens
RAARRRPEHLDTPDTPPRSQAQESNYENLSQMNPRSPPATMCSP

SEQ ID NO: 154 - protein, 26 aa, Homo sapiens
LLRVRSCRRKAARAALGMEAADAVTD

SEQ ID NO: 155 - protein, 48 aa, Homo sapiens
KKYFFKKEVQQLSVSFSSLQIKALQNAVEKEVQAEDNIYIENSLYATD

SEQ ID NO: 156 - protein, 185 aa, Homo sapiens
SYLDLPWYLRMVCQWTQTRRRARNIPLEELQRNLQFHAFISYSGHDSFWVKNELLPNLEKEGMQICLHERNFVPGKSIVENIITCIEKSYKSIFVLSPNFVQSEWCHYELYFAHHNLFHEGSNSLILILLEPIPQYSIPSSYHKLKSLMARRTYLEWPKEKSKRGLFWANLRAAINIKLTEQAKK

SEQ ID NO: 157 - protein, 214 aa, Homo sapiens
CLHFDLPWYLRMLGQCTQTWHRVRKTTQEQLKRNVRFHAFISYSEHDSLWVKNELIPNLEKEDGSILICLYESYFDPGKSISENIVSFIEKSYKSIFVLSPNFVQNEWCHYEFYFAHHNLFHENSDHIILILLEPIPFYCIPTRYHKLKALLEKKAYLEWPKDRRKCGLFWANLRAAINVNVLATREMYELQTFTELNEESRGSTISLMRTDCL

SEQ ID NO: 158 - protein, 175 aa, Homo sapiens
HRFHGLWYMKMMWAWLQAKRKPRKAPSRNICYDAFVSYSERDAYWVENLMVQELENFNPPFKLCLHKRDFIPGKWIIDNIIDSIEKSHKTVFVLSENFVKSEWCKYELDFSHFRLFDENNDAAILILLEPIEKKAIPQRFCKLRKIMNTKTYLEWPMDEAQREGFWVNLRAAIKS

SEQ ID NO: 159 - protein, 179 aa, Homo sapiens
EGWRISFYWNVSVHRVLGFKEIDRQTEQFEYAAYIIHAYKDKDWVWEHFSSMEKEDQSLKFCLEERDFEAGVFELEAIVNSIKRSRKIIFVITHHLLKDPLCKRFKVHHAVQQAIEQNLDSIILVFLEEIPDYKLNHALCLRRGMFKSHCILNWPVQKERIGAFRHKLQVALGSKNSVH

SEQ ID NO: 160 - protein, 187 aa, Homo sapiens
KFYFHLMLLAGCIKYGRGENIYDAFVIYSSQDEDWVRNELVKNLEEGVPPFQLCLHYRDFIPGVAIAANIIHEGFHKSRKVIVVVSQHFIQSRWCIFEYEIAQTWQFLSSRAGIIFIVLQKVEKTLLRQQVELYRLLSRNTYLEWEDSVLGRHIFWRRLRKALLDGKSWNPEGTVGTGCNWQEATSI

SEQ ID NO: 161 - protein, 198 aa, Homo sapiens
TKFRGFCFICYKTAQRLVFKDHPQGTEPDMYKYDAYLCFSSKDFTWVQNALLKHLDTQYSDQNRFNLCFEERDFVPGENRIANIQDAIWNSRKIVCLVSRHFLRDGWCLEAFSYAQGRCLSDLNSALIMVVVGSLSQYQLMKHQSIRGFVQKQQYLRWPEDFQDVGWFLHKLSQQILKKEKEKKKDNNIPLQTVATIS

SEQ ID NO: 162 - protein, 189 aa, Homo sapiens
YLDLPWYLRMVCQWTQTRRRARNIPLEELQRNLQFHAFISYSEHDSAWVKSELVPYLEKEDIQICLHERNFVPGKSIVENIINCIEKSYKSIFVLSPNFVQSEWCHYELYFAHHNLFHEGSNNLILILLEPIPQNSIPNKYHKLKALMTQRTYLQWPKEKSKRGLFWANIRAAFNMKLTLVTENNDVKS

SEQ ID NO: 163 - protein, 189 aa, Homo sapiens
HLYFWDVWYIYHFCKAKIKGYQRLISPDCCYDAFIVYDTKDPAVTEWVLAELVAKLEDPREKHFNLCLEERDWLPGQPVLENLSQSIQLSKKTVFVMTDKYAKTENFKIAFYLSHQRLMDEKVDVIILIFLEKPFQKSKFLQLRKRLCGSSVLEWPTNPQAHPYFWQCLKNALATDNHVAYSQVFKETV

SEQ ID NO: 164 - protein, 193 aa, Homo sapiens
HHLFYWDVWFIYNVCLAKVKGYRSLSTSQTFYDAYISYDTKDASVTDWVINELRYHLEESRDKNVLLCLEERDWDPGLAIIDNLMQSINQSKKTVFVLTKKYAKSWNFKTAFYLALQRLMDENMDVIIFILLEPVLQHSQYLRLRQRICKSSILQWPDNPKAEGLFWQTLRNVVLTENDSRYNNMYVDSIKQY

SEQ ID NO: 165 - protein, 193 aa, Homo sapiens
GWDLWYCFHLCLAWLPWRGRQSGRDEDALPYDAFVVFDKTQSAVADWVYNELRGQLEECRGRWALRLCLEERDWLPGKTLFENLWASVYGSRKTLFVLAHTDRVSGLLRASFLLAQQRLLEDRKDVVVLVILSPDGRRSRYVRLRQRLCRQSVLLWPHQPSGQRSFWAQLGMALTRDNHHFYNRNFCQGPTAE

SEQ ID NO: 166 - protein, 48 aa, Homo sapiens
QRRKYRSNKGESPVEPAEPCHYSCPREEEGSTIPIQEDYRKPEPACSP

SEQ ID NO: 167 - protein, 383 aa, Homo sapiens
CYRKKGKALTANLWHWINEACGRLSGDKESSGDSCVSTHTANFGQQGACEGVLLLTLEEKTFPEDMCYPDQGGVCQGTCVGGGPYAQGEDARMLSLVSKTEIEEDSFRQMPTEDEYMDRPSQPTDQLLFLTEPGSKSTPPFSEPLEVGENDSLSQCFTGTQSTVGSESCNCTEPLCRTDWTPMSSENYLQKEVDSGHCPHWAASPSPNWADVCTGCRNPPGEDCEPLVGSPKRGPLPQCAYGMGLPPEEEASRTEARDQPEDGADGRLPSSARAGAGSGSSPGGQSPASGNVTGNSNSTFISSGQVMNFKGDIIVVYVSQTSQEGAAAAAEPMGRPVQEETLARRDSFAGNGPRFPDPCGGPEGLREPEKASRPVQEQGGAKA

SEQ ID NO: 168 - protein, 28 aa, Homo sapiens
RRCRRREKFTTPIEETGGEGCPAVALIQ

SEQ ID NO: 169 - protein, 107 aa, Homo sapiens
KKRGDPCSCQPRSRPRQSPAKSSQDHAMEAGSPVSTSPEPVETCSFCFPECRAPTQESAVTPGTPDPTCAGRWGCHTRTTVLQPCPHIPDSGLGIVCVPAQEGGPGA

SEQ ID NO: 170 - protein, 85 aa, Homo sapiens
SWRRRQRRLRGASSAEAPDGDKDAPEPLDKVIILSPGISDATAPAWPPPGEDPGTTPPGHSVPVPATELGSTELVTTKTAGPEQQ

SEQ ID NO: 171 - protein, 60 aa, Homo sapiens
CVKRRKPRGDVVKVIVSVQRKRQEAEGEATVIEALQAPPDVTTVAVEETIPSFTGRSPNH

SEQ ID NO: 172 - protein, 155 aa, Homo sapiens
KRWNSCKQNKQGANSRPVNQTPPPEGEKLHSDSGISVDSQSLHDQQPHTQTASGQALKGDGGLYSSLPPAKREEVEKLLNGSAGDTWRHLAGELGYQPEHIDSFTHEACPVRALLASWATQDSATLDALLAALRRIQRADLVESLCSESTATSPV

SEQ ID NO: 173 - protein, 107 aa, Homo sapiens
RKINSEPLKDEFKNTGSGLLGMANIDLEKSRTGDEIILPRGLEYTVEECTCEDCIKSKPKVDSDHCFPLPAMEEGATILVTTKTNDYCKSLPAALSATEIEKSISAR

SEQ ID NO: 174 - protein, 58 aa, Homo sapiens
QLGLHIWQLRSQCMWPRETQLLLEVPPSTEDARSCQFPEEERGERSAEEKGRLGDLWV

SEQ ID NO: 175 - protein, 232 aa, Homo sapiens
YCKRQFMEKKPSWSLRSQDIQYNGSELSCFDRPQLHEYAHRACCQCRRDSVQTCGPVRLLPSMCCEEACSPNPATLGCGVHSAASLQARNAGPAGEMVPTFFGSLTQSICGEFSDAWPLMQNPMGGDNISFCDSYPELTGEDIHSLNPELESSTSLDSNSSQDLVGGAVPVQSHSENFTAATDLSRYNNTLVESASTQDALTMRSQLDQESGAVIHPATQTSLQVRQRLGSL

SEQ ID NO: 176 - protein, 247 aa, Homo sapiens
NLLKRKGYHCTAHKEVGPGPGGGGSGINPAYRTEDANEDTIGVLVRLITEKKENAAALEELLKEYHSKQLVQTSHRPVSKLPPAPPNVPHICPHRHHLHTVQGLASLSGPCCSRCSQKKWPEVLLSPEAVAATTPVPSLLPNPTRVPKAGAKAGRQGEITILSVGRFRVARIPEQRTSSMVSEVKTITEAGPSWGDLPDSPQPGLPPEQQALLGSGGSRTKWLKPPAENKAEENRYVVRLSESNLVI

SEQ ID NO: 177 - protein, 223 aa, Homo sapiens
MYRYQRWKSKLYSIVCGKSTPEKEGELEGTTTKPLAPNPSFSPTPGFTPTLGFSPVPSSTFTSSSTYTPGDCPNFAAPRREVAPPYQGADPILATALASDPIPNPLQKWEDSAHKPQSLDTDDPATLYAVVENVPPLRWKEFVRRLGLSDHEIDRLELQNGRCLREAQYSMLATWRRRTPRREATLELLGRVLRDMDLLGCLEDIEEALCGPAALPPAPSLLR

SEQ ID NO: 178 - protein, 174 aa, Homo sapiens
KKKPLCLQREAKVPHLPADKARGTQGPEQQHLLITAPSSSSSSLESSASALDRRAPTRNQPQAPGVEASGAGEARASTGSSDSSPGGHGTQVNVTCIVNVCSSSDHSSQCSSQASSTMGDTDSSPSESPKDEQVPFSKEECAFRSQLETPETLLGSTEEKPLPLGVPDAGMKPS

SEQ ID NO: 179 - protein, 197 aa, Homo sapiens
TYTYRHCWPHKPLVTADEAGMEALTPPPATHLSPLDSAHTLLAPPDSSEKICTVQLVGNSWTPGYPETQEALCPQVTWSWDQLPSRALGPAAAPTLSPESPAGSPAMMLQPGPQLYDVMDAVPARRWKEFVRTLGLREAEIEAVEVEIGRFRDQQYEMLKRWRQQQPAGLGAVYAALERMGLDGCVEDLRSRLQRGP

SEQ ID NO: 180 - protein, 138 aa, Homo sapiens
LYCKQFFNRHCQRGGLLQFEADKTAKEESLFPVPPSKETSAESQVSENIFQTQPLNPILEDDCSSTSGFPTQESFTMASCTSESHSHWVHSPIECTELDLQKFSSSASYTGAETLGGNTVESTGDRLELNVPFEVPSP

SEQ ID NO: 181 - protein, 187 aa, Homo sapiens
KSHPSLCRKLGSLLKRRPQGEGPNPVAGSWEPPKAHPYFPDLVQPLLPISGDVSPVSTGLPAAPVLEAGVPQQQSPLDLTREPQLEPGEQSQVAHGTNGIHVTGGSMTITGNIYIYNGPVLGGPPGPGDLPATPEPPYPIPEEGDPGPPGLSTPHQEDGKAWHLAETEHCGATPSNRGPRNQFITHD

SEQ ID NO: 182 - protein, 42 aa, Homo sapiens
ALYLLRRDQRLPPDAHKPPGGGSFRTPIQEEQADAHSTLAKI

SEQ ID NO: 183 - protein, 62 aa, Homo sapiens
KKVAKKPTNKAPHPKQEPQEINFPDDLPGSNTAAPVQETLHGCQPVTQEDGKESRISVQERQ

SEQ ID NO: 184 - protein, 189 aa, Homo sapiens
CHRRACRKRIRQKLHLCYPVQTSQPKLELVDSRPRRSSTQLRSGASVTEPVAEERGLMSQPLMETCHSVGAAYLESLPLQDASPAGGPSSPRDLPEPRVSTEHTNNKIEKIYIMKADTVIVGTVKAELPEGRGLAGPAEPELEEELEADHTPHYPEQETEPPLGSCSDVMLSVEEEGKEDPLPTAASGK

SEQ ID NO: 185 - protein, 42 aa, Homo sapiens
KRGRKKLLYIFKQPFMRPVQTTQEEDGCSCRFPEEEEGGCEL

SEQ ID NO: 186 - protein, 240 aa, Homo sapiens
YILKTKPSAPACCTSHPGKSVEAQVSKDEEKKEAPDNVVMFSEKDEFEKLTATPAKPTKSENDASSENEQLLSRSVDSDEEPAPDKQGSPELCLLSLVHLAREKSATSNKSAGIQSRRKKILDVYANVCGVVEGLSPTELPFDCLEKTSRMLSSTYNSEKAVVKTWRHLAESFGLKRDEIGGMTDGMQLFDRISTAGYSIPELLTKLVQIERLDAVESLCADILEWAGVVPPASQPHAAS

SEQ ID NO: 187 - protein, 235 aa, Homo sapiens
HCHRLPGSYDSTSSDSLYPRGIQFKRPHTVAPWPPAYPPVTSYPPLSQPDLLPIPRSPQPLGGSHRTPSSRRDSDGANSVASYENEGASGIRGAQAGWGVWGPSWTRLTPVSLPPEPACEDADEDEDDYHNPGYLVVLPDSTPATSTAAPSAPALSTPGIRDSAFSMESIDDYVNVPESGESAEASLDGSREYVNVSQELHPGAAKTEPAALSSQEAEEVEEEGAPDYENLQELN

SEQ ID NO: 188 - protein, 217 aa, Homo sapiens
RCSRPGAKRSEKIYQQRSLREDQQSFTGSRTYSLVGQAWPGPLADMAPTRKDKLLQFYPSLEDPASSRYQNFSKGSRHGSEEAYIDPIAMEYYNWGRFSKPPEDDDANSYENVLICKQKTTETGAQQEGIGGLCRGDLSLSLALKTGPTSGLCPSASPEEDEESEDYQNSASIHQWRESRKVMGQLQREASPGPVGSPDEEDGEPDYVNGEVAATEA

SEQ ID NO: 189 - protein, 340 aa, Homo sapiens
WNWNKRKKRQVPYLRVTVMPLLTLPQTRQRAKNIYDILPWRQEDLGRHESRSMRIFSTESLLSRNSESPEHVPSQAGNAFQEHTAHIHATEYAVGIYDNAMVPQMCGNLTPSAHCINVRASRDCASISSEDSHDYVNVPTAEEIAETLASTKSPSRNLFVLPSTQKLEFTEERDEGCGDAGDCTSLYSPGAEDSDSLSNGEGSSQISNDYVNMTGLDLSAIQERQLWVAFQCCRDYENVPAADPSGSQQQAEKDVPSSNIGHVEDKTDDPGTHVQCVKRTFLASGDYADFQPFTQSEDSQMKHREEMSNEDSSDYENVLTAKLGGRDSEQGPGTQLLPDE

SEQ ID NO: 190 - protein, 395 aa, Homo sapiens
SSCDREKKPRQHSGDHENLMNVPSDKEMFSRSVTSLATDAPASSEQNGALTNGDILSEDSTLTCMQHYEEVQTSASDLLDSQDSTGKPKCHQSRELPRIPPESAVDTMLTARSVDGDQGLGMEGPYEVLKDSSSQENMVEDCLYETVKEIKEVAAAAHLEKGHSGKAKSTSASKELPGPQTEGKAEFAEYASVDRNKKCRQSVNVESILGNSCDPEEEAPPPVPVKLLDENENLQEKEGGEAEESATDTTSETNKRFSSLSYKSREEDPTLTEEEISAMYSSVNKPGQLVNKSGQSLTVPESTYTSIQGDPQRSPSSCNDLYATVKDFEKTPNSTLPPAGRPSEEPEPDYEAIQTLNREEEKATLGTNGHHGLVPKENDYESISDLQQGRDITRL

SEQ ID NO: 191 - protein, 235 aa, Homo sapiens; identical to SEQ ID NO: 187

SEQ ID NO: 192 - protein, 21 aa, Homo sapiens
MEEGQYSEIEELPRRRCCRRG

SEQ ID NO: 193 - protein, 37 aa, Homo sapiens
MSDSKEPRLQQLGLLEEEQLRGLGFRQTRGYKSLAGC

SEQ ID NO: 194 - protein, 33 aa, Homo sapiens
MQDEDGYITLNIKTRKPALISVGSASSSWWRVM

SEQ ID NO: 195 - protein, 44 aa, Homo sapiens
MEYHPDLENLDEDGYTQLHFDSQSNTRIAVVSEKGSCAASPPWR

SEQ ID NO: 196 - protein, 35 aa, Homo sapiens
MHEEEIYTSLQWDSPAPDTYQKCLSSNKCSGACCL

SEQ ID NO: 197 - protein, 38 aa, Homo sapiens
MQDEERYMTLNVQSKKRSSAQTSQLTFKDYSVTLHWYK

SEQ ID NO: 198 - protein, 30 aa, Homo sapiens
MENEDGYMTLSFKNRCKSKQKSKDFSLYPQ

SEQ ID NO: 199 - protein, 70 aa, Homo sapiens
MSKQRGTFSEVSLAQDPKRQQRKPKGNKSSISGTEQEIFQVELNLQNPSLNHQGIDKIYDCQGLLPPPEK

SEQ ID NO: 200 - protein, 51 aa, Homo sapiens
MGWIRGRRSRHSWEMSEFHNYNLDLKKSDFSTRWQKQRCPVVKSKCRENAS

SEQ ID NO: 201 - protein, 70 aa, Homo sapiens
MSKQRGTFSEVSLAQDPKWQQRKPKGNKSSISGTEQEIFQVELNLQNASLNHQGIDKIYDCQGLLPPPEK

SEQ ID NO: 202 - protein, 19 aa, Homo sapiens
MNSSKSSETQCTERGCFSS

SEQ ID NO: 203 - protein, 20 aa, Homo sapiens
MMQEQQPQSTEKRGWLSLRL

SEQ ID NO: 204 - protein, 39 aa, Homo sapiens
MTRTYENFQYLENKVKVQGFKNGPLPLQSLLQRLCSGPC

SEQ ID NO: 205 - protein, 17 aa, Homo sapiens
MGLEKPQSKLEGGMHPQ

SEQ ID NO: 206 - protein, 21 aa, Homo sapiens
MVPEEEPQDREKGLWWFQLKV

SEQ ID NO: 207 - protein, 172 aa, Homo sapiens
MHNLYSITGYPDPPGTMEEEEEDDDYENSTPPYKDLPPKPGTMEEEEEDDDYENSTPPYKDLPPKPGTMEEEEEDDDYENSTPPYKDLPPKPGSSAPPRPPRAAKETEKPPLPCKPRNMTGLDLAAVTCPPPQLAVNLEPSPLQPSLAATPVPWLNQRSGGPGCCQKRWMVY

SEQ ID NO: 208 - protein, 17 aa, Homo sapiens
MPEEGSGCSVRRRPYGC

SEQ ID NO: 209 - protein, 37 aa, Homo sapiens
MEESVVRPSVFVVDGQTDIPFTRLGRSHRRQSCSVAR

SEQ ID NO: 210 - protein, 37 aa, Homo sapiens
MDPGLQQALNGMAPPGDTAMHVPAGSVASHLGTTSRS

SEQ ID NO: 211 - protein, 35 aa, Homo sapiens
MSTESMIRDVELAEEALPKKTGGPQGSRRCLFLSL

SEQ ID NO: 212 - protein, 23 aa, Homo sapiens
MERVQPLEENVGNAARPRFERNK

SEQ ID NO: 213 - protein, 22 aa, Homo sapiens
MIETYNQTSPRSAATGLPISMK

SEQ ID NO: 214 - protein, 80 aa, Homo sapiens
MQQPFNYPYPQIYWVDSSASSPWAPPGTVLPCPTSVPRRPGQRRPPPPPPPPPLPPPPPPPPLPPLPLPPLKKRGNHSTG

SEQ ID NO: 215 - protein, 28 aa, Homo sapiens
MEYASDASLDPEAPWPPAPRARACRVLP

SEQ ID NO: 216 - protein, 17 aa, Homo sapiens
MAMMEVQGGPSLGQTCV

SEQ ID NO: 217 - protein, 47 aa, Homo sapiens
MRRASRDYTKYLRGSEEMGGGPGAPHEGPLHAPPPPAPHQPPAASRS

SEQ ID NO: 218 - protein, 21 aa, Homo sapiens
MAARRSQRRRGRRGEPGTALL

SEQ ID NO: 219 - protein, 28 aa, Homo sapiens
MPASSPFLLAPKGPPGNMGGPVREPALS

SEQ ID NO: 220 - protein, 46 aa, Homo sapiens
MDDSTEREQSRLTSCLKKREEMKLKECVSILPRKESPSVRSSKDGK

SEQ ID NO: 221 - protein, 28 aa, Homo sapiens
MCLSHLENMPLSHSRTQGAQRSSWKLWL

SEQ ID NO: 222 - protein, 36 aa, Homo sapiens
CYRVNRQQKLSSLCARPRRSPAQEDGKVYINMPGRG

SEQ ID NO: 223 - protein, 21 aa, Homo sapiens
LLPLGGLPLLITTCFCLFCCL

SEQ ID NO: 224 - protein, 20 aa, Homo sapiens
LQEKVWVMLVTSLVALQGMS

SEQ ID NO: 225 - protein, 21 aa, Homo sapiens
YIPYIILTIIILTIVGFIWLL

SEQ ID NO: 226 - protein, 23 aa, Homo sapiens
GAIGGAGVTALLALCLCLIFFIV

SEQ ID NO: 227 - protein, 24 aa, Homo sapiens
AIAGIVIGVVALVALIAVALACFL

SEQ ID NO: 228 - protein, 21 aa, Homo sapiens
FLLWILAAVSSGLFFYSFLLT

SEQ ID NO: 229 - protein, 17 aa, Homo sapiens
LGWLCLLLLPIPLIVWV

SEQ ID NO: 230 - protein, 21 aa, Homo sapiens
LVPWLPASLLGLMVIAAALLV

SEQ ID NO: 231 - protein, 21 aa, Homo sapiens
VIIFFAFVLLLSGALAYCLAL

SEQ ID NO: 232 - protein, 22 aa, Homo sapiens
WMVAVILMASVFMVCLALLGCF

SEQ ID NO: 233 - protein, 22 aa, Homo sapiens
VAAVLASLLVLLALLLAALLYV

SEQ ID NO: 234 - protein, 21 aa, Homo sapiens
TFLVAGGSLAFGTLLCIAIVL

SEQ ID NO: 235 - protein, 22 aa, Homo sapiens
AIVVPVCLAFLLTTLLGVLFCF

SEQ ID NO: 236 - protein, 19 aa, Homo sapiens
ILIGTSVVIILFILLFFLL

SEQ ID NO: 237 - protein, 19 aa, Homo sapiens
ILIGTSVVIILFILLFFLL

SEQ ID NO: 238 - protein, 20 aa, Homo sapiens
VLIGTSVVIILFILLLFFLL

SEQ ID NO: 239 - protein, 21 aa, Homo sapiens
LHILIGTSVAIILFIILFFFL

SEQ ID NO: 240 - protein, 21 aa, Homo sapiens
LHILIGTSVAIILFIILFFFL

SEQ ID NO: 241 - protein, 20 aa, Homo sapiens
ILIGTSVVIILFILLLFFLL

SEQ ID NO: 242 - protein, 20 aa, Homo sapiens
VLIGTSVVIFLFILLLFFLL

SEQ ID NO: 243 - protein, 21 aa, Homo sapiens
HVLIGTSVVIIPFAILLFFLL

SEQ ID NO: 244 - protein, 21 aa, Homo sapiens
LLFLILGVLSLLLLVTGAFGF

SEQ ID NO: 245 - protein, 21 aa, Homo sapiens
VIGILVAVILLLLLLLLLFLI

SEQ ID NO: 246 - protein, 21 aa, Homo sapiens
VIGILVAVVLLLLLLLLLFLI

SEQ ID NO: 247 - protein, 21 aa, Homo sapiens
VLIGVSVAFVLLLFLLLFLLL

SEQ ID NO: 248 - protein, 21 aa, Homo sapiens
VLIGVLVVSILLLSLLLFLLL

SEQ ID NO: 249 - protein, 21 aa, Homo sapiens
VVTGVSVAFVLLLFLLLFLLL

SEQ ID NO: 250 - protein, 21 aa, Homo sapiens
AGTVLLLRAGFYAVSFLSVAV

SEQ ID NO: 251 - protein, 21 aa, Homo sapiens
VGVVGGLLGSLVLLVWVLAVI

SEQ ID NO: 252 - protein, 21 aa, Homo sapiens
GAFLGIGITALLFLCLALIIM

SEQ ID NO: 253 - protein, 23 aa, Homo sapiens
GAVGGAGATALVFLSFCVIFIVV

SEQ ID NO: 254 - protein, 21 aa, Homo sapiens
VVGGAGATALVFLSFCVIFVV

SEQ ID NO: 255 - protein, 21 aa, Homo sapiens
SWPVIVAALLFCCMILFGLGV

SEQ ID NO: 256 - protein, 21 aa, Homo sapiens
AAVIAGPVCFVCISLMLMVYI

SEQ ID NO: 257 - protein, 21 aa, Homo sapiens
VTGISLLPPLGVAISVIIIFY

SEQ ID NO: 258 - protein, 21 aa, Homo sapiens
LLGAMAATLVVICTAVIVVVA

SEQ ID NO: 259 - protein, 21 aa, Homo sapiens
IYIGAGICAGLALALIFGALI

SEQ ID NO: 260 - protein, 21 aa, Homo sapiens
LISGTLGIICLSLMSTLGILL

SEQ ID NO: 261 - protein, 21 aa, Homo sapiens
AGIILLVLVVTGLSVSVTSLI

SEQ ID NO: 262 - protein, 21 aa, Homo sapiens
VAIALGLLTAVLLSVLLYQWI

SEQ ID NO: 263 - protein, 23 aa, Homo sapiens
LIVGILGIICLILMASVVTIVVI

SEQ ID NO: 264 - protein, 21 aa, Homo sapiens
LLAGLVAADAVASLLIVGAVF

SEQ ID NO: 265 - protein, 21 aa, Homo sapiens
AISVGISLLLLLVVCGIGCVW

SEQ ID NO: 266 - protein, 21 aa, Homo sapiens
GVLAGIVMGDLVLTVLIALAV

SEQ ID NO: 267 - protein, 21 aa, Homo sapiens
LCYILDAILFLYGIVLTLLYC

SEQ ID NO: 268 - protein, 21 aa, Homo sapiens
VLFYLAVGIMFLVNTVLWVTI

SEQ ID NO: 269 - protein, 23 aa, Homo sapiens
IIVAVVIATAVAAIVAAVVALIY

SEQ ID NO: 270 - protein, 23 aa, Homo sapiens
IIVAVVTGIAVAAIVAAVVALIY

SEQ ID NO: 271 - protein, 21 aa, Homo sapiens
VSFCLVMVLLFAVDTGLYFSV

SEQ ID NO: 272 - protein, 19 aa, Homo sapiens
LIRMAVAGLVLVALLAILV

SEQ ID NO: 273 - protein, 23 aa, Homo sapiens
YALIPIPLAVITTCIVLYMNGIL

SEQ ID NO: 274 - protein, 21 aa, Homo sapiens
FLVIIVILSALFLGTLACFCV

SEQ ID NO: 275 - protein, 21 aa, Homo sapiens
WAVYAGLLGGVIMILIMVVIL

SEQ ID NO: 276 - protein, 21 aa, Homo sapiens
LLSVLAMFFLLVLILSSVFLF

SEQ ID NO: 277 - protein, 21 aa, Homo sapiens
ILFMVSGICIVFGFIILLLLV

SEQ ID NO: 278 - protein, 21 aa, Homo sapiens
VLLCLLLVPLLLSLFVLGLFL

SEQ ID NO: 279 - protein, 26 aa, Homo sapiens
IYLIIGICGGGSLLMVFVALLVFYIT

SEQ ID NO: 280 - protein, 22 aa, Homo sapiens
LWIGLFLMVCLLCVGIFSWCIW

SEQ ID NO: 281 - protein, 26 aa, Homo sapiens
VMSVATIVIVDICITGGLLLLVYYWS

SEQ ID NO: 282 - protein, 21 aa, Homo sapiens
GFLFAEIVSIFVLAVGVYFIA

SEQ ID NO: 283 - protein, 21 aa, Homo sapiens
LCYLLDGILFIYGVILTALFL

SEQ ID NO: 284 - protein, 21 aa, Homo sapiens
IVTGVLVGVALVAALVCFLLL

SEQ ID NO: 285 - protein, 25 aa, Homo sapiens
ALIVGTLSGTIFFILLIIFLSWIIL

SEQ ID NO: 286 - protein, 23 aa, Homo sapiens
VWVIAVIVIAIVVGVAVICVVPY

SEQ ID NO: 287 - protein, 21 aa, Homo sapiens
GVVIIVILLILTGAGLAAYFF

SEQ ID NO: 288 - protein, 17 aa, Homo sapiens
VLALIVIFLTIAVLLAL

SEQ ID NO: 289 - protein, 21 aa, Homo sapiens
VVISVGSMGLIISLLCVYFWL

SEQ ID NO: 290 - protein, 21 aa, Homo sapiens
FILISSLAILLMVSLLLLSLW

SEQ ID NO: 291 - protein, 23 aa, Homo sapiens
LILTLSLILVVILVLLTVLALLS

SEQ ID NO: 292 - protein, 23 aa, Homo sapiens
IILGLFGLLLLLTCLCGTAWLCC

SEQ ID NO: 293 - protein, 26 aa, Homo sapiens
NLGSVYIYVLLIVGTLVCGIVLGFLF

SEQ ID NO: 294 - protein, 21 aa, Homo sapiens
IWLIVGICIALFALPFVIYAA

SEQ ID NO: 295 - protein, 21 aa, Homo sapiens
IGGIITVFLIALVLTSTIVTL

SEQ ID NO: 296 - protein, 21 aa, Homo sapiens
FLVLPSLLILLLVIAAGGVIW

SEQ ID NO: 297 - protein, 21 aa, Homo sapiens
VLLVVILIVVYHVYWLEMVLF

SEQ ID NO: 298 - protein, 20 aa, Homo sapiens
HMIGICVTLTVIIVCSVFIY

SEQ ID NO: 299 - protein, 21 aa, Homo sapiens
IYCIIAVCSVFLMLINVLVII

SEQ ID NO: 300 - protein, 21 aa, Homo sapiens
AYLIGGLIALVAVAVSVVYIY

SEQ ID NO: 301 - protein, 21 aa, Homo sapiens
SLGILSFLGLVAGALALGLWL

SEQ ID NO: 302 - protein, 25 aa, Homo sapiens
WLIFFASLGSFLSILLVGVLGYLGL

SEQ ID NO: 303 - protein, 21 aa, Homo sapiens
WMAFVAPSICIAIIMVGIFST

SEQ ID NO: 304 - protein, 21 aa, Homo sapiens
VYWFITGISILLVGSVILLIV

SEQ ID NO: 305 - protein, 21 aa, Homo sapiens
LLLLSLLVATWVLVAGIYLMW

SEQ ID NO: 306 - protein, 21 aa, Homo sapiens
WALVWLACLLFAAALSLILLL

SEQ ID NO: 307 - protein, 21 aa, Homo sapiens
LGLLILALLALLTLLGVVLAL

SEQ ID NO: 308 - protein, 21 aa, Homo sapiens
GMIIAVLILVAVVCLVTVCVI

SEQ ID NO: 309 - protein, 21 aa, Homo sapiens
GVVLLYILLGTIGTLVAVLAA

SEQ ID NO: 310 - protein, 25 aa, Homo sapiens
IPWLGHLLVGLSGAFGFIILVYLLI

SEQ ID NO: 311 - protein, 21 aa, Homo sapiens
GWNPHLLLLLLLVIVFIPAFW

SEQ ID NO: 312 - protein, 21 aa, Homo sapiens
YSFSGAFLFSMGFLVAVLCYL

SEQ ID NO: 313 - protein, 21 aa, Homo sapiens
LLLGMIVFAVMLSILSLIGIF

SEQ ID NO: 314 - protein, 21 aa, Homo sapiens
VLPGILFLWGLFLLGCGLSLA

SEQ ID NO: 315 - protein, 20 aa, Homo sapiens
TSLLIALGTLLALVCVFVIC

SEQ ID NO: 316 - protein, 22 aa, Homo sapiens
AIVVPVCLAFLLTTLLGVLFCF

SEQ ID NO: 317 - protein, 25 aa, Homo sapiens
PILLTISILSFFSVALLVILACVLW

SEQ ID NO: 318 - protein, 25 aa, Homo sapiens
VGLIIAILIPVAVAVIVGVVTSILC

SEQ ID NO: 319 - protein, 21 aa, Homo sapiens
VVVACMSIMALLLLLLLLLLY

SEQ ID NO: 320 - protein, 21 aa, Homo sapiens
LIHILLPMVFCVLLIMVMCYL

SEQ ID NO: 321 - protein, 23 aa, Homo sapiens
IATGMVGALLLLLVVALGIGLFM

SEQ ID NO: 322 - protein, 24 aa, Homo sapiens
FPWLLIIIFGIFGLTVMLFVFLFS

SEQ ID NO: 323 - protein, 23 aa, Homo sapiens
IIIGPLIFVFLFSVVIGSIYLFL

SEQ ID NO: 324 - protein, 23 aa, Homo sapiens
AGLYVIVPVIISSSILLLGTLLI

SEQ ID NO: 325 - protein, 24 aa, Homo sapiens
TTVWISVAVLSAVICLIIVWAVAL

SEQ ID NO: 326 - protein, 22 aa, Homo sapiens
ISLVTALHLVLGLSAVLGLLLL

SEQ ID NO: 327 - protein, 23 aa, Homo sapiens
IATGMVGALLLLLVVALGIGLFM

SEQ ID NO: 328 - protein, 23 aa, Homo sapiens
SIISAVVGILLVVVLGVVFGILI

SEQ ID NO: 329 - protein, 23 aa, Homo sapiens
GLIAGVVSISTALLLLLGFFLWL

SEQ ID NO: 330 - protein, 21 aa, Homo sapiens
IIIYCTGAFLISCMVGSVIVY

SEQ ID NO: 331 - protein, 21 aa, Homo sapiens
IAIYCIGVFLIACMVVTVILC

SEQ ID NO: 332 - protein, 21 aa, Homo sapiens
ILSYGVGFFLFILVVAAVTLC

SEQ ID NO: 333 - protein, 21 aa, Homo sapiens
IILYASGSLALAVLLLLAGLY

SEQ ID NO: 334 - protein, 21 aa, Homo sapiens
IIILVGTAVIAMFFWLLLVII

SEQ ID NO: 335 - protein, 21 aa, Homo sapiens
IVILVGTGVIAVFFWVLLLLI

SEQ ID NO: 336 - protein, 21 aa, Homo sapiens
IVAVIFGLLLGAALLLGILVF

SEQ ID NO: 337 - protein, 23 aa, Homo sapiens
LIAGSAAAGVVFVVSLVAISIVC

SEQ ID NO: 338 - protein, 21 aa, Homo sapiens
AAVLVLLVIVIISLIVLVVIW

SEQ ID NO: 339 - protein, 21 aa, Homo sapiens
VVISAILALVVLTIISLIILI

SEQ ID NO: 340 - protein, 22 aa, Homo sapiens
IITAEGIILLFCAVVPGTLLLF

SEQ ID NO: 341 - protein, 21 aa, Homo sapiens
GIIMIQTLLIILFIIVPIFLL

SEQ ID NO: 342 - protein, 20 aa, Homo sapiens
LQEKVWVMLVTSLVALQGMS

SEQ ID NO: 343 - protein, 21 aa, Homo sapiens
GGTVLLLLFVISITTIIVIFL

SEQ ID NO: 344 - protein, 22 aa, Homo sapiens
IVLLLALVIFYLTLIIFTCKFA

SEQ ID NO: 345 - protein, 21 aa, Homo sapiens
FWLPIGCAAFVVVCILGCILI

SEQ ID NO: 346 - protein, 23 aa, Homo sapiens
IVIITVVAAAVIMGTAGLSTYLY

SEQ ID NO: 347 - protein, 25 aa, Homo sapiens
MVIIVTVVSVLLSLFVTSVLLCFIF

SEQ ID NO: 348 - protein, 25 aa, Homo sapiens
FVPVFVAVLLTLGVVTIVLALMYVF

SEQ ID NO: 349 - protein, 21 aa, Homo sapiens
AVIRYSVAIILFTILPFFLLH

SEQ ID NO: 350 - protein, 19 aa, Homo sapiens
VLIGTSVVKIPFTILLFFL

SEQ ID NO: 351 - protein, 20 aa, Homo sapiens
VLIGTSVVKIPFTILLFFLL

SEQ ID NO: 352 - protein, 19 aa, Homo sapiens
VLIGTSVVKLPFTILLFFL

SEQ ID NO: 353 - protein, 20 aa, Homo sapiens
VLIGTSVVKIPFTILLFFLL

SEQ ID NO: 354 - protein, 19 aa, Homo sapiens
VLIGTSVVKLPFTILLFFL

SEQ ID NO: 355 - protein, 20 aa, Homo sapiens
ILIGTSVVKIPFTILLFFLL

SEQ ID NO: 356 - protein, 21 aa, Homo sapiens
MGLAFLVLVALVWFLVEDWLS

SEQ ID NO: 357 - protein, 21 aa, Homo sapiens
LVPVFCGLLVAKSLVLSALLV

SEQ ID NO: 358 - protein, 21 aa, Homo sapiens
AGTVLLLRAGFYAVSFLSVAV

SEQ ID NO: 359 - protein, 21 aa, Homo sapiens
AALAVISFLLGLGLGVACVLA

SEQ ID NO: 360 - protein, 22 aa, Homo sapiens
MALIVLGGVAGLLLFIGLGIFF

SEQ ID NO: 361 - protein, 27 aa, Homo sapiens
FWVLVVVGGVLACYSLLVTVAFIIFWV

SEQ ID NO: 362 - protein, 21 aa, Homo sapiens
FLFVLLGVGSMGVAAIVWGAW

SEQ ID NO: 363 - protein, 21 aa, Homo sapiens
LWVAVGGAAGGAALLAAGAGL

SEQ ID NO: 364 - protein, 21 aa, Homo sapiens
YLYVLSGIGGLLLLLLIFIVL

SEQ ID NO: 365 - protein, 23 aa, Homo sapiens
IAAIVGGTVAGIVLIGILLLVIW

SEQ ID NO: 366 - protein, 21 aa, Homo sapiens
ILLLTLVSFLIFILFIIVQLF

SEQ ID NO: 367 - protein, 19 aa, Homo sapiens
VAVGLGSCLAILILAICGL

SEQ ID NO: 368 - protein, 23 aa, Homo sapiens
TLIRGALMGAGFLLTYGLTWIYY

SEQ ID NO: 369 - protein, 21 aa, Homo sapiens
VALLLGALGFKALLLLGVLAA

SEQ ID NO: 370 - protein, 21 aa, Homo sapiens
VVLVAVGEVAMKILLLCLCLI

SEQ ID NO: 371 - protein, 21 aa, Homo sapiens
IYAGVCISVLVLLALLGVIIA

SEQ ID NO: 372 - protein, 21 aa, Homo sapiens
LLIVTIVATMLVLAVTVTSLC

SEQ ID NO: 373 - protein, 21 aa, Homo sapiens
ALLIVTIVVIMLVLGLAVAFC

SEQ ID NO: 374 - protein, 21 aa, Homo sapiens
ALVSGMCCALFLLILLTGVLC

SEQ ID NO: 375 - protein, 21 aa, Homo sapiens
FFMINTSILLIFIFIVLLIHF

SEQ ID NO: 376 - protein, 21 aa, Homo sapiens
TIIGVSVLSVLVVSVVAVLVY

SEQ ID NO: 377 - protein, 21 aa, Homo sapiens
FSLFIVCTVTLTLFLMTILTV

SEQ ID NO: 378 - protein, 21 aa, Homo sapiens
LIVTIGATMLVLAVTVTSLCI

SEQ ID NO: 379 - protein, 21 aa, Homo sapiens
LILFSLSISVSLFLMVMMTAS

SEQ ID NO: 380 - protein, 21 aa, Homo sapiens
AVILFFFTFFITTMVMLAALA

SEQ ID NO: 381 - protein, 21 aa, Homo sapiens
FALSLLAVALGLGVPMLHHLC

SEQ ID NO: 382 - protein, 21 aa, Homo sapiens
ILVIFSGMFLVFTLAGALFLH

SEQ ID NO: 383 - protein, 21 aa, Homo sapiens
GLIILLLFASVALVAAIIFGV

SEQ ID NO: 384 - protein, 21 aa, Homo sapiens
ILGGALSLTFVLGLLSGFLVW

SEQ ID NO: 385 - protein, 21 aa, Homo sapiens
TLGLCLCAVLCCFLVAVACFL

SEQ ID NO: 386 - protein, 21 aa, Homo sapiens
FGAPALLGLALVLALVLVGLV

SEQ ID NO: 387 - protein, 21 aa, Homo sapiens
WWFLSGSLVIVIVCSTVGLII

SEQ ID NO: 388 - protein, 22 aa, Homo sapiens
LIPVYCSILAAVVVGLVAYIAF

SEQ ID NO: 389 - protein, 23 aa, Homo sapiens
ILWTCLGLSLIISLAVFVLMFLL

SEQ ID NO: 390 - protein, 21 aa, Homo sapiens
LGWLTVVLLAVAACVLLLTSA

SEQ ID NO: 391 - protein, 21 aa, Homo sapiens
AAVICSALATVLLALLILCVI

SEQ ID NO: 392 - protein, 21 aa, Homo sapiens
YAVIAIVPVFCLMGLLGILVC

SEQ ID NO: 393 - protein, 21 aa, Homo sapiens
VLLPLVIFFGLCLLSLLFIGL

SEQ ID NO: 394 - protein, 30 aa, Homo sapiens
FALPVGLIVGVTALGLLIIGVVNCVIMTQV

SEQ ID NO: 395 - protein, 21 aa, Homo sapiens
MFWVQVLLAGLVVPLLLGATL

SEQ ID NO: 396 - protein, 21 aa, Homo sapiens
LVALVSSLLVVFTLAFLGLFF

SEQ ID NO: 397 - protein, 21 aa, Homo sapiens
LAVLLPLAFFLLLATVFSCIW

SEQ ID NO: 398 - protein, 21 aa, Homo sapiens
VAAILGLGLVLGLLGPLAILL

SEQ ID NO: 399 - protein, 22 aa, Homo sapiens
ALVVIPIIFGILFAILLVLVFI

SEQ ID NO: 400 - protein, 21 aa, Homo sapiens
PVLFWVILVLVVVVGSSAFLL

SEQ ID NO: 401 - protein, 27 aa, Homo sapiens
IISFFLALTSTALLFLLFFLTLRFSVV

SEQ ID NO: 402 - protein, 21 aa, Homo sapiens
LIIAMSTIFIMAIAIVLIIMF

SEQ ID NO: 403 - protein, 23 aa, Homo sapiens
ILVPCVLGLLLLPILAMLMALCV

SEQ ID NO: 404 - protein, 21 aa, Homo sapiens
ELLWPGAALLVLLGVAASLCV

SEQ ID NO: 405 - protein, 21 aa, Homo sapiens
IFSGFAGLLAILLVVAVFCIL

SEQ ID NO: 406 - protein, 21 aa, Homo sapiens
LWGSLAAVAIFFVITFLIFLC

SEQ ID NO: 407 - protein, 23 aa, Homo sapiens
ILVPCVLGLLLLPILAMLMALCV

SEQ ID NO: 408 - protein, 26 aa, Homo sapiens
TQIVLLGLVTAALWAGLLTLLLLWHW

SEQ ID NO: 409 - protein, 21 aa, Homo sapiens
LGHGPLVLQLLSFTLLAGLLV

SEQ ID NO: 410 - protein, 21 aa, Homo sapiens
ALILLILCVGMVVGLVALGIW

SEQ ID NO: 411 - protein, 21 aa, Homo sapiens
LIAVILGILCLVILVIAVVLG

SEQ ID NO: 412 - protein, 21 aa, Homo sapiens
VMVISCVFCMGLLTASIFLGV

SEQ ID NO: 413 - protein, 21 aa, Homo sapiens
ILLGISGTVNGILTLTLISLI

SEQ ID NO: 414 - protein, 21 aa, Homo sapiens
YYCLLLIFGCIVILIFIMTGI

SEQ ID NO: 415 - protein, 23 aa, Homo sapiens
LTAEVLGIICIVLMATVLKTIVL

SEQ ID NO: 416 - protein, 21 aa, Homo sapiens
PFFFCCFIAVAMGIRFIIMVA

SEQ ID NO: 417 - protein, 23 aa, Homo sapiens
LTAEVLGIICIVLMATVLKTIVL

SEQ ID NO: 418 - protein, 21 aa, Homo sapiens
QMFLWTVAGIPILFLSACFIT

SEQ ID NO: 419 - protein, 21 aa, Homo sapiens
WSVAGISIALLSACFIVSCVV

SEQ ID NO: 420 - protein, 21 aa, Homo sapiens
HLLLSLGLGLLLLVIICVVGF

SEQ ID NO: 421 - protein, 21 aa, Homo sapiens
LIPSVIAVVFILLLSVCFIAS

SEQ ID NO: 422 - protein, 23 aa, Homo sapiens
WSMAVVSILLLSVCFTVSSVVPH

SEQ ID NO: 423 - protein, 21 aa, Homo sapiens
LCLLVVTSLFLGCLGLTVTLI

SEQ ID NO: 424 - protein, 21 aa, Homo sapiens
VLRAALVPLVAGLVICLVVCI

SEQ ID NO: 425 - protein, 21 aa, Homo sapiens
VGLGLLLLLMGAGLAVQGWFL

SEQ ID NO: 426 - protein, 25 aa, Homo sapiens
YFYLTTATLALCLVFTVATIMVLVV

SEQ ID NO: 427 - protein, 21 aa, Homo sapiens
FSFLIVAGATTLFCLLHFGVI

SEQ ID NO: 428 - protein, 27 aa, Homo sapiens
LLLVASVIQGLGLLLCFTYICLHFSAL

SEQ ID NO: 429 - protein, 24 aa, Homo sapiens
IFMYLLTVFLITQMIGSALFAVYL

SEQ ID NO: 430 - protein, 22 aa, Homo sapiens
LCLLVMFFMVLVALVGLGLGMF

SEQ ID NO: 431 - protein, 21 aa, Homo sapiens
WALVAGLLLLLLLAAACAVFL

SEQ ID NO: 432 - protein, 21 aa, Homo sapiens
LIVIFTVLLQSLCVAVTYVYF

SEQ ID NO: 433 - protein, 21 aa, Homo sapiens
MFVALLGLGLGQVVCSVALFF

SEQ ID NO: 434 - protein, 21 aa, Homo sapiens
VPLALGLGLALACLGLLLAVV

SEQ ID NO: 435 - protein, 21 aa, Homo sapiens
VALWLSWGAALGAVACAMALL

SEQ ID NO: 436 - protein, 21 aa, Homo sapiens
LLAATLLLALLSCCLTVVSFY

SEQ ID NO: 437 - protein, 21 aa, Homo sapiens
FCSIVMLLFLCSFSWLIFIFL

SEQ ID NO: 438 - protein, 45 aa, Homo sapiens
TTTPAPRPPTPAPTIASQPLSLRPEACRPAAGGAVHTRGLDFACD

SEQ ID NO: 439 - protein, 55 aa, Homo sapiens
FVPVFLPAKPTTTPAPRPPTPAPTIASQPLSLRPEACRPAAGGAVHTRGLDFACD

SEQ ID NO: 440 - protein, 232 aa, Homo sapiens
EPKSCDKTHTCPPCPAPELLGGPSVFLFPPKPKDTLMISRTPEVTCVVVDVSHEDPEVKFNWYVDGVEVHNAKTKPREEQYNSTYRVVSVLTVLHQDWLNGKEYKCKVSNKALPAPIEKTISKAKGQPREPQVYTLPPSRDELTKNQVSLTCLVKGFYPSDIAVEWESNGQPENNYKTTPPVLDSDGSFFLYSKLTVDKSRWQQGNVFSCSVMHEALHNHYTQKSLSLSPGK

SEQ ID NO: 441 - protein, 236 aa, Homo sapiens
EPKSPDKTHTCPPCPAPELLGGPSVFLFPPKPKDTLMISRTPEVTCVVVDVSHEDPEVKFNWYVDGVEVHNAKTKPREEQYNSTYRVVSVLTVLHQDWLNGKEYKCKVSNKALPAPIEKTISKAKGQPREPQVYTLPPSRDELTKNQVSLTCLVKGFYPSDIAVEWESNGQPENNYKTTPPVLDSDGSFFLYSKLTVDKSRWQQGNVESCSVMHEALHNHYTQKSLSLSPGKKDPK

SEQ ID NO: 442 - protein, 39 aa, Homo sapiens
IEVMYPPPYLDNEKSNGTIIHVKGKHLCPSPLFPGPSKP

SEQ ID NO: 443 - protein, 16 aa, Homo sapiens
SPTEPSSKTGNPRHLH

SEQ ID NO: 444 - protein, 12 aa, Homo sapiens
ESKYGPPCPSCP

SEQ ID NO: 445 - protein, 229 aa, Homo sapiens
ESKYGPPCPSCPAPEFLGGPSVFLFPPKPKDTLMISRTPEVTCVVVDVSQEDPEVQFNWYVDGVEVHNAKTKPREEQFNSTYRVVSVLTVLHQDWLNGKEYKCKVSNKGLPSSIEKTISKAKGQPREPQVYTLPPSQEEMTKNQVSLTCLVKGFYPSDIAVEWESNGQPENNYKTTPPVLDSDGSFFLYSRLTVDKSRWQEGNVFSCSVMHEALHNHYTQKSLSLSLGK

SEQ ID NO: 446 - protein, 16 aa, Homo sapiens
GLAVSTISSFFPPGYQ

SEQ ID NO: 447 - protein, 5 aa, Artificial Sequence
  source: /note="Description of Artificial Sequence: Synthetic peptide"
GGGGS

SEQ ID NO: 448 - protein, 10 aa, Artificial Sequence
  source: /note="Description of Artificial Sequence: Synthetic peptide"
GGGGSGGGGS

SEQ ID NO: 449 - protein, 15 aa, Artificial Sequence
  source: /note="Description of Artificial Sequence: Synthetic peptide"
GGGGSGGGGSGGGGS

SEQ ID NO: 450 - protein, 25 aa, Artificial Sequence
  source: /note="Description of Artificial Sequence: Synthetic peptide"
GGSGGSGGYPYDVPDYAGGGSGGGS

SEQ ID NO: 451 - protein, 24 aa, Artificial Sequence
  source: /note="Description of Artificial Sequence: Synthetic peptide"
GGSGGSGGGGGSGGGSGGGSGGGS

SEQ ID NO: 452 - protein, 26 aa, Artificial Sequence
  source: /note="Description of Artificial Sequence: Synthetic peptide"
GGSGGSGGGPEDEPGSGSGGGSGGGS

SEQ ID NO: 453 - protein, 42 aa, Artificial Sequence
  source: /note="Description of Artificial Sequence: Synthetic polypeptide"
GGSGGSGGGGGSGGGSGGGSGGGSGSGSGSGSEDGSGSGSGS

SEQ ID NO: 454 - protein, 28 aa, Artificial Sequence
  source: /note="Description of Artificial Sequence: Synthetic peptide"
GSGSGSGSGSEDEDEDEDGSGSGSGSGS

SEQ ID NO: 455 - protein, 1 aa, Artificial Sequence
  source: /note="Description of Artificial Sequence: Synthetic peptide"
S

SEQ ID NO: 456 - protein, 18 aa, Artificial Sequence
  source: /note="Description of Artificial Sequence: Synthetic peptide"
GSGSGSGSEDGSGSGSGS

SEQ ID NO: 457 - protein, 18 aa, Artificial Sequence
  source: /note="Description of Artificial Sequence: Synthetic peptide"
GSGSGSGSGSGSGSGSGS

SEQ ID NO: 458 - protein, 15 aa, Artificial Sequence
  source: /note="Description of Artificial Sequence: Synthetic peptide"
GCGGSGGGGSGGGGS

SEQ ID NO: 459 - protein, 24 aa, Artificial Sequence
  source: /note="Description of Artificial Sequence: Synthetic peptide"
GGSGGSGGGGGSGGGSGGGSGGGS

SEQ ID NO: 460 - protein, 26 aa, Artificial Sequence
  source: /note="Description of Artificial Sequence: Synthetic peptide"
SGRGGGGSGGGGSGGGGSGGGGSSPA

SEQ ID NO: 461 - protein, 24 aa, Artificial Sequence
  source: /note="Description of Artificial Sequence: Synthetic peptide"
GGGGSGGGGSGGGGSGGGGSGGGG

SEQ ID NO: 462 - protein, 58 aa, Artificial Sequence
  source: /note="Description of Artificial Sequence: Synthetic polypeptide"
SGRGASSGSSGSGSQKKPRYEIRWKVVVISAILALVVLTVISLIILIMLWGSGMQSPA

SEQ ID NO: 463 - protein, 30 aa, Homo sapiens
MKTLPAMLGTGKLFWVFFLIPYLDIWNIHG

SEQ ID NO: 464 - protein, 24 aa, Homo sapiens
MLLEPGRGCCALAILLAIVDIQSG

SEQ ID NO: 465 - protein, 28 aa, Homo sapiens
MLCPWRTANLGLLLILTIFLVAASSSLC

SEQ ID NO: 466 - protein, 17 aa, Homo sapiens
MPLLLLLPLLWAGALAM

SEQ ID NO: 467 - protein, 34 aa, Homo sapiens
MGHLSAPLHRVRVPWQGLLLTASLLTFWNPPTTA

SEQ ID NO: 468 - protein, 35 aa, Homo sapiens
MACLGFQRHKAQLNLATRTWPCTLLFFLLFIPVFC

SEQ ID NO: 469 - protein, 25 aa, Homo sapiens
MLGIWTLLPLVLTSVARLSSKSVNA

SEQ ID NO: 470 - protein, 19 aa, Homo sapiens
MLLWTAVLLFVPCVGKTVW

SEQ ID NO: 471 - protein, 21 aa, Homo sapiens
MLPCLVVLLAALLSLRLGSDA

SEQ ID NO: 472 - protein, 19 aa, Homo sapiens
MAWSLGSWLGGCLLVSALG

SEQ ID NO: 473 - protein, 19 aa, Homo sapiens
MLAVGCALLAALLAAPGAA

SEQ ID NO: 474 - protein, 22 aa, Homo sapiens
MLTLQTWLVQALFIFLTTESTG

SEQ ID NO: 475 - protein, 21 aa, Homo sapiens
MSLLVVSMACVGFFLLQGAWP

SEQ ID NO: 476 - protein, 21 aa, Homo sapiens
MSLMVVSMACVGFFLLQGAWP

SEQ ID NO: 477 - protein, 21 aa, Homo sapiens
MSLMVVSMVCVGFFLLQGAWP

SEQ ID NO: 478 - protein, 21 aa, Homo sapiens
MSLMVISMACVGFFLLQGAWT

SEQ ID NO: 479 - protein, 21 aa, Homo sapiens
MSLMVVSMACVGFFLLQGAWT

SEQ ID NO: 480 - protein, 21 aa, Homo sapiens
MSLMVVSMACVGLFLVQRAGP

SEQ ID NO: 481 - protein, 21 aa, Homo sapiens
MSLTVVSMACVGFFLLQGAWP

SEQ ID NO: 482 - protein, 25 aa, Homo sapiens
MSLMVVSMACVGFFLLEGPWPHVGG

SEQ ID NO: 483 - protein, 22 aa, Homo sapiens
MWEAQFLGLLFLQPLWVAPVKP

SEQ ID NO: 484 - protein, 23 aa, Homo sapiens
MTPILTVLICLGLSLGPRTHVQA

SEQ ID NO: 485 - protein, 21 aa, Homo sapiens
MTPIVTVLICLGLSLGPRTHV

SEQ ID NO: 486 - protein, 23 aa, Homo sapiens
MTPALTALLCLGLSLGPRTRVQA

SEQ ID NO: 487 - protein, 21 aa, Homo sapiens
MIPTFTALLCLGLSLGPRTHM

SEQ ID NO: 488 - protein, 23 aa, Homo sapiens
MTLTLSVLICLGLSVGPRTCVQA

SEQ ID NO: 489 - protein, 18 aa, Homo sapiens
MAWMLLLILIMVHPGSCA

SEQ ID NO: 490 - protein, 23 aa, Homo sapiens
MQIPQAPWPVVWAVLQLGWRPGW

SEQ ID NO: 491 - protein, 16 aa, Homo sapiens
MLLPLLLSSLLGGSQA

SEQ ID NO: 492 - protein, 18 aa, Homo sapiens
MLLLLLLPLLWGRERVEG

SEQ ID NO: 493 - protein, 17 aa, Homo sapiens
MLLLLLPLLWGRERAEG

SEQ ID NO: 494 - protein, 21 aa, Homo sapiens
MEKKWKYCAVYYIIQIHFVKG

SEQ ID NO: 495 - protein, 33 aa, Homo sapiens
MEAAVAAPRPRLLLLVLAAAAAAAAALLPGATA

SEQ ID NO: 496 - protein, 22 aa, Homo sapiens
MGRGLLRGLWPLHIVLWTRIAS

SEQ ID NO: 497 - protein, 21 aa, Homo sapiens
MRWCLLLIWAQGLRQAPLASG

SEQ ID NO: 498 - protein, 21 aa, Homo sapiens
MFSHLPFDCVLLLLLLLLTRS

SEQ ID NO: 499 - protein, 503 aa, Homo sapiens
MEAAVAAPRPRLLLLVLAAAAAAAAALLPGATALQCFCHLCTKDNFTCVTDGLCFVSVTETTDKVIHNSMCIAEIDLIPRDRPFVCAPSSKTGSVTTTYCCNQDHCNKIELPTTVKSSPGLGPVELAAVIAGPVCFVCISLMLMVYICHNRTVIHHRVPNEEDPSLDRPFISEGTTLKDLIYDMTTSGSGSGLPLLVQRTIARTIVLQESIGKGRFGEVWRGKWRGEEVAVKIFSSREERSWFREAEIYQTVMLRHENILGFIAADNKDNGTWTQLWLVSDYHEHGSLFDYLNRYTVTVEGMIKLALSTASGLAHLHMEIVGTQGKPAIAHRDLKSKNILVKKNGTCCIADLGLAVRHDSATDTIDIAPNHRVGTKRYMAPEVLDDSINMKHFESFKRADIYAMGLVFWEIARRCSIGGIHEDYQLPYYDLVPSDPSVEEMRKVVCEQKLRPNIPNRWQSCEALRVMAKIMRECWYANGAARLTALRIKKTLSQLSQQEGIKM

SEQ ID NO: 500 - protein, 567 aa, Homo sapiens
MGRGLLRGLWPLHIVLWTRIASTIPPHVQKSVNNDMIVTDNNGAVKFPQLCKFCDVRFSTCDNQKSCMSNCSITSICEKPQEVCVAVWRKNDENITLETVCHDPKLPYHDFILEDAASPKCIMKEKKKPGETFFMCSCSSDECNDNIIFSEEYNTSNPDLLLVIFQVTGISLLPPLGVAISVIIIFYCYRVNRQQKLSSTWETGKTRKLMEFSEHCAIILEDDRSDISSTCANNINHNTELLPIELDTLVGKGRFAEVYKAKLKQNTSEQFETVAVKIFPYEEYASWKTEKDIFSDINLKHENILQFLTAEERKTELGKQYWLITAFHAKGNLQEYLTRHVISWEDLRKLGSSLARGIAHLHSDHTPCGRPKMPIVHRDLKSSNILVKNDLTCCLCDFGLSLRLDPTLSVDDLANSGQVGTARYMAPEVLESRMNLENVESFKQTDVYSMALVLWEMTSRCNAVGEVKDYEPPFGSKVREHPCVESMKDNVLRDRGRPEIPSFWLNHQGIQMVCETLTECWDHDPEARLTAQCVAERFSELEHLDRLSGRSCSEEKIPEDGSLNTTK

SEQ ID NO: 501 - protein, 162 aa, Homo sapiens
MRISKPHLRSISIQCYLCLLLNSHFLTEAGIHVFILGCFSAGLPKTEANWVNVISDLKKIEDLIQSMHIDATLYTESDVHPSCKVTAMKCFLLELQVISLESGDASIHDTVENLIILANNSLSSNGNVTESGCKECEELEEKNIKEFLQSFVHIVQMFINTS

SEQ ID NO: 502 - protein, 161 aa, Homo sapiens
RISKPHLRSISIQCYLCLLLNSHFLTEAGIHVFILGCFSAGLPKTEANWVNVISDLKKIEDLIQSMHIDATLYTESDVHPSCKVTAMKCFLLELQVISLESGDASIHDTVENLIILANNSLSSNGNVTESGCKECEELEEKNIKEFLQSFVHIVQMFINTS

SEQ ID NO: 503 - protein, 114 aa, Homo sapiens
NWVNVISDLKKIEDLIQSMHIDATLYTESDVHPSCKVTAMKCFLLELQVISLESGDASIHDTVENLIILANNSLSSNGNVTESGCKECEELEEKNIKEFLQSFVHIVQMFINTS

SEQ ID NO: 504 - protein, 267 aa, Homo sapiens
MAPRRARGCRTLGLPALLLLLLLRPPATRGITCPPPMSVEHADIWVKSYSLYSRERYICNSGFKRKAGTSSLTECVLNKATNVAHWTTPSLKCIRDPALVHQRPAPPSTVTTAGVTPQPESLSPSGKEPAASSPSSNNTAATTAAIVPGSQLMPSKSPSTGTTEISSHESSHGTPSQTTAKNWELTASASHQPPGVYPQGHSDTTVAISTSTVLLCGLSAVSLLACYLKSRQTPPLASVEMEAMEALPVTWGTSSRDEDLENCSHHL

SEQ ID NO: 505 - protein, 266 aa, Homo sapiens
APRRARGCRTLGLPALLLLLLLRPPATRGITCPPPMSVEHADIWVKSYSLYSRERYICNSGFKRKAGTSSLTECVLNKATNVAHWTTPSLKCIRDPALVHQRPAPPSTVTTAGVTPQPESLSPSGKEPAASSPSSNNTAATTAAIVPGSQLMPSKSPSTGTTEISSHESSHGTPSQTTAKNWELTASASHQPPGVYPQGHSDTTVAISTSTVLLCGLSAVSLLACYLKSRQTPPLASVEMEAMEALPVTWGTSSRDEDLENCSHHL

SEQ ID NO: 506 - protein, 237 aa, Homo sapiens
ITCPPPMSVEHADIWVKSYSLYSRERYICNSGFKRKAGTSSLTECVLNKATNVAHWTTPSLKCIRDPALVHQRPAPPSTVTTAGVTPQPESLSPSGKEPAASSPSSNNTAATTAAIVPGSQLMPSKSPSTGTTEISSHESSHGTPSQTTAKNWELTASASHQPPGVYPQGHSDTTVAISTSTVLLCGLSAVSLLACYLKSRQTPPLASVEMEAMEALPVTWGTSSRDEDLENCSHHL

SEQ ID NO: 507 - protein, 402 aa, Artificial Sequence
  source: /note="Description of Artificial Sequence: Synthetic polypeptide"
MDWTWILFLVAAATRVHSNWVNVISDLKKIEDLIQSMHIDATLYTESDVHPSCKVTAMKCFLLELQVISLESGDASIHDTVENLIILANNSLSSNGNVTESGCKECEELEEKNIKEFLQSFVHIVQMFINTSSGGGSGGGGSGGGGSGGGGSGGGGSGGGGSGGGITCPPPMSVEHADIWVKSYSLYSRERYICNSGFKRKAGTSSLTECVLNKATNVAHWTTPSLKCIRDPALVHQRPAPPSTVTTAGVTPQPESLSPSGKEPAASSPSSNNTAATTAAIVPGSQLMPSKSPSTGTTEISSHESSHGTPSQTTAKNWELTASASHQPPGVYPQGHSDTTVAISTSTVLLCGLSAVSLLACYLKSRQTPPLASVEMEAMEALPVTWGTSSRDEDLENCSHHL

SEQ ID NO: 508 - protein, 201 aa, Artificial Sequence
  source: /note="Description of Artificial Sequence: Synthetic polypeptide"
MDWTWILFLVAAATRVHSNWVNVISDLKKIEDLIQSMHIDATLYTESDVHPSCKVTAMKCFLLELQVISLESGDASIHDTVENLIILANNSLSSNGNVTESGCKECEELEEKNIKEFLQSFVHIVQMFINTSTTTPAPRPPTPAPTIASQPLSLRPEACRPAAGGAVHTRGLDFACDIYIWAPLAGTCGVLLLSLVITLYC

SEQ ID NO: 509 - protein, 224 aa, Artificial Sequence
  source: /note="Description of Artificial Sequence: Synthetic polypeptide"
MDWTWILFLVAAATRVHSNWVNVISDLKKIEDLIQSMHIDATLYTESDVHPSCKVTAMKCFLLELQVISLESGDASIHDTVENLIILANNSLSSNGNVTESGCKECEELEEKNIKEFLQSFVHIVQMFINTSGSGSGSGSGSGSGSGSGSGSGSGSGSGSGSVAISTSTVLLCGLSAVSLLACYLKSRQTPPLASVEMEAMEALPVTWGTSSRDEDLENCSHHL

SEQ ID NO: 510 - protein, 21 aa, Artificial Sequence
  source: /note="Description of Artificial Sequence: Synthetic peptide"
GSGEGRGSLLTCGDVEENPGP

SEQ ID NO: 511 - protein, 22 aa, Artificial Sequence
  source: /note="Description of Artificial Sequence: Synthetic peptide"
GSGATNFSLLKQAGDVEENPGP

SEQ ID NO: 512 - protein, 23 aa, Artificial Sequence
  source: /note="Description of Artificial Sequence: Synthetic peptide"
GSGQCTNYALLKLAGDVESNPGP

SEQ ID NO: 513 - protein, 25 aa, Artificial Sequence
  source: /note="Description of Artificial Sequence: Synthetic peptide"
GSGVKQTLNFDLLKLAGDVESNPGP

SEQ ID NO: 514 - protein, 636 aa, Tribolium castaneum
MMLNWLKSGKLESQSQEQSSCYLENSNCLPPTLDSTDIIGEENKAGTTSRKKRKYDEDYLNFGFTWTGDKDEPNGLCVICEQVVNNSSLNPAKLKRHLDTKHPTLKGKSEYFKRKCNELNQKKHTFERYVRDDNKNLLKASYLVSLRIAKQGEAYTIAEKLIKPCTKDLTTCVFGEKFASKVDLVPLSDTTISRRIEDMSYFCEAVLVNRLENAKCGFTLQMDESTDVAGLAILLVFVRYIHESSFEEDMLFCKALPTQTTGEEIFNLLNAYFEKHSIPWNLCYHICTDGAKAMVGVIKGVIARIKKLVPDIKASHCCLHRHALAVKRIPNALHEVLNDAVKMINFIKSRPLNARVFALLCDDLGSLHKNLLLHTEVRWLSRGKVLTRFWELRDEIRIFFNEREFAGKLNDTSWLQNLAYIADIFSYLNEVNLSLQGPNSTIFKVNSRINSIKSKLKLWEECITKNNTECFANLNDFLETSNTALDPNLKSNILEHLNGLKNTFLEYFPPTCNNISWVENPFNECGNVDTLPIKEREQLIDIRTDTTLKSSFVPDGIGPFWIKLMDEFPEISKRAVKELMPFVTTYLCEKSFSVYVATKTKYRNRLDAEDDMRLQLTTIHPDIDNLCNNKQAQKSH

SEQ ID NO: 515 - protein, 636 aa, Tribolium castaneum; identical to SEQ ID NO: 514

SEQ ID NO: 516 - DNA, 1911 bp, Tribolium castaneum
atgatgttgaattggctgaaaagtggaaagcttgaaagtcaatcacaggaacagagttcctgctaccttgagaactctaactgcctgccaccaacgctcgattctacagatattatcggtgaagagaacaaagctggtaccacctctcgcaagaagcggaaatatgacgaggactatctgaacttcggttttacatggactggcgacaaggatgagcccaacggactttgtgtgatttgcgagcaggtagtcaacaattcctcacttaacccggccaaactgaaacgccatttggacacaaagcatccgacgcttaaaggcaagagcgaatacttcaaaagaaaatgtaacgagctcaatcaaaagaagcatacttttgagcgatacgtaagggacgataacaagaacctcctgaaagcttcttatctcgtcagtttgagaatagctaaacagggcgaggcatataccatagcggagaagttgatcaagccttgcaccaaggatctgacaacttgcgtatttggagaaaaattcgcgagcaaagttgatctcgtccccctgtccgacacgactatttcaaggcgaatcgaagacatgagttacttctgtgaagccgtgctggtgaacaggttgaaaaatgctaaatgtgggtttacgctgcagatggacgagtcaacagatgttgccggtcttgcaatcctgcttgtgtttgttaggtacatacatgaaagctcttttgaggaggatatgttgttctgcaaagcacttcccactcagacgacaggggaggagattttcaatcttctcaatgcctatttcgaaaagcactccatcccatggaatctgtgttaccacatttgcacagacggtgccaaggcaatggtaggagttattaaaggagtcatagcgagaataaaaaaactcgtccctgatataaaagctagccactgttgcctgcatcgccacgctttggctgtaaagcgaataccgaatgcattgcacgaggtgctcaatgacgctgttaaaatgatcaacttcatcaagtctcggccgttgaatgcgcgcgtcttcgctttgctgtgtgacgatttggggagcctgcataaaaatcttcttcttcataccgaagtgaggtggctgtctagaggaaaggtgctgacccgattttgggaactgagagatgaaattagaattttcttcaacgaaagggaatttgccgggaaattgaacgacaccagttggttgcaaaatttggcatatatagctgacatattcagttatctgaatgaagttaatctttccctgcaagggccgaatagcacaatcttcaaggtaaatagccgcattaacagtattaaatcaaagttgaagttgtgggaagagtgtataacgaaaaataacactgagtgttttgcgaacctcaacgattttttggaaacttcaaacactgcgttggatccaaacctgaagtctaatattttggaacatctcaacggtcttaagaacacctttctggagtattttccacctacgtgtaataatatctcctgggtggagaatcctttcaatgaatgcggtaacgtcgatacactcccaataaaagagagggaacaattgattgacatacggactgatacgacattgaaatcttcattcgtgcctgatggtataggaccattctggatcaaactgatggacgaatttccagaaattagcaaacgagctgtcaaagagctcatgccatttgtaaccacttacctctgtgagaaatcattttccgtctatgtagccacaaaaacaaaatatcgaaatagacttgatgctgaagacgatatgcgactccaacttactactatccatccagacattgacaacctttgtaacaacaagcaggctcagaaatcccactga

SEQ ID NO: 517 - DNA, 1911 bp, Tribolium castaneum; identical to SEQ ID NO: 516

SEQ ID NO: 518 - protein, 206 aa, Staphylococcus aureus
MKKWTNRLMTIAGVVLILVAAYLFAKPHIDNYLHDKDKDEKIEQYDKNVKEQASKDNKQQAKPQIPKDKSKVAGYIEIPDADIKEPVYPGPATPEQLNRGVSFAEENESLDDQNISIAGHTFIDRPNYQFTNLKAAKKGSMVYFKVGNETRKYKMTSIRDVKPTDVEVLDEQKGKDKQLTLITCDDYNEKTGVWEKRKIFVATEVK

SEQ ID NO: 519 - protein, 156 aa, Artificial Sequence
  source: /note="Description of Artificial Sequence: Synthetic polypeptide"
MQAKPQIPKDKSKVAGYIEIPDADIKEPVYPGPATREQLNRGVSFAKENQSLDDQNISIAGHTFIDRPNYQFTNLKAAKKGSMVYFKVGNETRKYKMTSIRNVKPTAVEVLDEQKGKDKQLTLITCDDYNEETGVWETRKIFVATEVKLEHHHHHH

SEQ ID NO: 520 - protein, 5 aa, Artificial Sequence
  source: /note="Description of Artificial Sequence: Synthetic peptide"
  MOD_RES (3)..(3): Any amino acid
LPXTG

SEQ ID NO: 521 - protein, 5 aa, Artificial Sequence
  source: /note="Description of Artificial Sequence: Synthetic peptide"
  MOD_RES (3)..(3): Any amino acid
LPXTA

SEQ ID NO: 522 - DNA, 18 bp, Homo sapiens
tgctgttgaggagctgga

SEQ ID NO: 523 - DNA, 18 bp, Homo sapiens
agcacaccaggcagagtt

SEQ ID NO: 524 - DNA, 18 bp, Homo sapiens
cggctgaggagcggaaga

SEQ ID NO: 525 - DNA, 18 bp, Homo sapiens
tggaggtgagcaatcccc

SEQ ID NO: 526 - DNA, 20 bp, Artificial Sequence
  source: /note="Description of Artificial Sequence: Synthetic oligonucleotide"
ttaatacgactcactatagg

SEQ ID NO: 527 - DNA, 20 bp, Homo sapiens
gttttagagctagaaatagc

SEQ ID NO: 528 - protein, 240 aa, Artificial Sequence
  source: /note="Description of Artificial Sequence: Synthetic polypeptide"
MGRGLLRGLWPLHIVLWTRIASTIPPHVQKSVNNDMIVTDNNGAVKFPQLCKFCDVRFSTCDNQKSCMSNCSITSICEKPQEVCVAVWRKNDENITLETVCHDPKLPYHDFILEDAASPKCIMKEKKKPGETFFMCSCSSDECNDNIIFSEEYNTSNPDLLLVIFQVTGISLLPPLGVAISVIIIFYVYFLGRLVPRGRGAAEAATRKQRITETESPYQELQGQRSDVYSDLNTQRPYYK

SEQ ID NO: 529 - protein, 239 aa, Artificial Sequence
  source: /note="Description of Artificial Sequence: Synthetic polypeptide"
MGRGLLRGLWPLHIVLWTRIASTIPPHVQKSVNNDMIVTDNNGAVKFPQLCKFCDVRFSTCDNQKSCMSNCSITSICEKPQEVCVAVWRKNDENITLETVCHDPKLPYHDFILEDAASPKCIMKEKKKPGETFFMCSCSSDECNDNIIFSEEYNTSNPDLLLVIFQGVLAGIVMGDLVLTVLIALAVYFLGRLVPRGRGAAEAATRKQRITETESPYQELQGQRSDVYSDLNTQRPYYK

SEQ ID NO: 530 - protein, 211 aa, Artificial Sequence
  source: /note="Description of Artificial Sequence: Synthetic polypeptide"
MGRGLLRGLWPLHIVLWTRIASTIPPHVQKSVNNDMIVTDNNGAVKFPQLCKFCDVRFSTCDNQKSCMSNCSITSICEKPQEVCVAVWRKNDENITLETVCHDPKLPYHDFILEDAASPKCIMKEKKKPGETFFMCSCSSDECNDNIIFSEEYNTSNPDLLLVIFQLLAGLVAADAVASLLIVGAVFLCARPRRSPAQEDGKVYINMPGRG

SEQ ID NO: 531 - protein, 241 aa, Artificial Sequence
  source: /note="Description of Artificial Sequence: Synthetic polypeptide"
MGRGLLRGLWPLHIVLWTRIASTIPPHVQKSVNNDMIVTDNNGAVKFPQLCKFCDVRFSTCDNQKSCMSNCSITSICEKPQEVCVAVWRKNDENITLETVCHDPKLPYHDFILEDAASPKCIMKEKKKPGETFFMCSCSSDECNDNIIFSEEYNTSNPDLLLVIFQQTTPGERSSLPAFYPGTSGSCSGCGSLSLPLLAGLVAADAVASLLIVGAVFLCARPRRSPAQEDGKVYINMPGRG

SEQ ID NO: 532 - protein, 223 aa, Artificial Sequence
  source: /note="Description of Artificial Sequence: Synthetic polypeptide"
MGRGLLRGLWPLHIVLWTRIASTIPPHVQKSVNNDMIVTDNNGAVKFPQLCKFCDVRFSTCDNQKSCMSNCSITSICEKPQEVCVAVWRKNDENITLETVCHDPKLPYHDFILEDAASPKCIMKEKKKPGETFFMCSCSSDECNDNIIFSEEYNTSNPDLLLVIFQVTGISLLPPLGVAISVIIIFYCYRVNRQQKLSSLCARPRRSPAQEDGKVYINMPGRG

SEQ ID NO: 533 - protein, 227 aa, Homo sapiens
MGRPLLLPLLLLLQPPAFLQPGGSTGSGPSYLYGVTQPKHLSASMGGSVEIPFSFYYPWELAIVPNVRISWRRGHFHGQSFYSTRPPSIHKDYVNRLFLNWTEGQESGFLRISNLRKEDQSVYFCRVELDTRRSGRQQLQSIKGTKLTITQAVTTTTTWRPSSTTTIAGLRVTESKGHSESWHLSLDTAIRVALAVAVLKTVILGLLCLLLLWWRRRKGSRAPSSDF

SEQ ID NO: 534 - protein, 21 aa, Homo sapiens
VALAVAVLKTVILGLLCLLLL

SEQ ID NO: 535 - protein, 15 aa, Homo sapiens
WWRRRKGSRAPSSDF

SEQ ID NO: 536 - protein, 598 aa, Homo sapiens
MTPIVTVLICLGLSLGPRTHVQTGTIPKPTLWAEPDSVITQGSPVTLSCQGSLEAQEYRLYREKKSASWITRIRPELVKNGQFHIPSITWEHTGRYGCQYYSRARWSELSDPLVLVMTGAYPKPTLSAQPSPVVTSGGRVTLQCESQVAFGGFILCKEGEEEHPQCLNSQPHARGSSRAIFSVGPVSPNRRWSHRCYGYDLNSPYVWSSPSDLLELLVPGVSKKPSLSVQPGPVVAPGESLTLQCVSDVGYDRFVLYKEGERDLRQLPGRQPQAGLSQANFTLGPVSRSYGGQYRCYGAHNLSSECSAPSDPLDILITGQIRGTPFISVQPGPTVASGENVTLLCQSWRQFHTFLLTKAGAADAPLRLRSIHEYPKYQAEFPMSPVTSAHAGTYRCYGSLNSDPYLLSHPSEPLELVVSGPSMGSSPPPTGPISTPAGPEDQPLTPTGSDPQSGLGRHLGVVIGILVAVVLLLLLLLLLFLILRHRRQGKHWTSTQRKADFQHPAGAVGPEPTDRGLQWRSSPAADAQEENLYAAVKDTQPEDGVEMDTRAAASEAPQDVTYAQLHSLTLRRKATEPPPSQEREPPAEPSIYATLAIH

SEQ ID NO: 537 - protein, 440 aa, Homo sapiens; identical to SEQ ID NO: 28

SEQ ID NO: 538 - protein, 147 aa, Homo sapiens
MEAAVAAPRPRLLLLVLAAAAAAAAALLPGATALQCFCHLCTKDNFTCVTDGLCFVSVTETTDKVIHNSMCIAEIDLIPRDRPFVCAPSSKTGSVTTTYCCNQDHCNKIELPTTVKSSPGLGPVELAAVIAGPVCFVCISLMLMVYI

SEQ ID NO: 539 - protein, 503 aa, Homo sapiens
MEAAVAAPRPRLLLLVLAAAAAAAAALLPGATALQCFCHLCTKDNFTCVTDGLCFVSVTETTDKVIHNSMCIAEIDLIPRDRPFVCAPSSKTGSVTTTYCCNQDHCNKIELPTTVKSSPGLGPVELAAVIAGPVCFVCISLMLMVYICHNRTVIHHRVPNEEDPSLDRPFISEGTTLKDLIYDMTTSGSGSGLPLLVQRTIARTIVLQESIGKGRFGEVWRGKWRGEEVAVKIFSSREERSWFREAEIYQTVMLRHENILGFIAADNKDNGTWTQLWLVSDYHEHGSLFDYLNRYTVTVEGMIKLALSTASGLAHLHMEIVGTQGKPAIAHRDLKSKNILVKKNGTCCIADLGLAVRHDSATDTIDIAPNHRVGTERYMAPEVLDDSINMKHFESFKRADIYAMGLVFWEIARRCSIGGIHEDYQLPYYDLVPSDPSVEEMRKVVCEQKLRPNIPNRWQSCEALRVMAKIMRECWYANGAARLTALRIKKTLSQLSQQEGIKM

SEQ ID NO: 540 - protein, 503 aa, Homo sapiens
MEAAVAAPRPRLLLLVLAAAAAAAAALLPGATALQCFCHLCTKDNFTCVTDGLCFVSVTETTDKVIHNSMCIAEIDLIPRDRPFVCAPSSKTGSVTTTYCCNQDHCNKIELPTTVKSSPGLGPVELAAVIAGPVCFVCISLMLMVYICHNRTVIHHRVPNEEDPSLDRPFISEGTTLKDLIYDMTTSGSGSGLPLLVQRTIARTIVLQESIGKGRFGEVWRGKWRGEEVAVRIFSSREERSWFREAEIYQTVMLRHENILGFIAADNKDNGTWTQLWLVSDYHEHGSLFDYLNRYTVTVEGMIKLALSTASGLAHLHMEIVGTQGKPAIAHRDLKSKNILVKKNGTCCIADLGLAVRHDSATDTIDIAPNHRVGTKRYMAPEVLDDSINMKHFESFKRADIYAMGLVFWEIARRCSIGGIHEDYQLPYYDLVPSDPSVEEMRKVVCEQKLRPNIPNRWQSCEALRVMAKIMRECWYANGAARLTALRIKKTLSQLSQQEGIKM

SEQ ID NO: 541 - protein, 503 aa, Homo sapiens
MEAAVAAPRPRLLLLVLAAAAAAAAALLPGATALQCFCHLCTKDNFTCVTDGLCFVSVTETTDKVIHNSMCIAEIDLIPRDRPFVCAPSSKTGSVTTTYCCNQDHCNKIELPTTVKSSPGLGPVELAAVIAGPVCFVCISLMLMVYICHNRTVIHHRVPNEEDPSLDRPFISEGTTLKDLIYDMTTSGSGSGLPLLVQRIIARTIVLQESIGKGRFGEVWRGKWRGEEVAVKIFSSREERSWFREAEIYQTVMLRHENILGFIAADNKDNGTWTQLWLVSDYHEHGSLFDYLNRYTVTVEGMIKLALSTASGLAHLHMEIVGTQGKPAIAHRDLKSKNILVKKNGTCCIADLGLAVRHDSATDTIDIAPNHRVGTKRYMAPEVLDDSINMKHFESFKRADIYAMGLVFWEIARRCSIGGIHEDYQLPYYDLVPSDPSVEEMRKVVCEQKLRPNIPNRWQSCEALRVMAKIMRECWYANGAARLTALRIKKTLSQLSQQEGIKM

SEQ ID NO: 542 - protein, 503 aa, Homo sapiens
MEAAVAAPRPRLLLLVLAAAAAAAAALLPGATALQCFCHLCTKDNFTCVTDGLCFVSVTETTDKVIHNSMCIAEIDLIPRDRPFVCAPSSKTGSVTTTYCCNQDHCNKIELPTTVKSSPGLGPVELAAVIAGPVCFVCISLMLMVYICHNRTVIHHRVPNEEDPSLDRPFISEGTTLKDLIYDMTTSGSGSGLPLLVQRTIARTIVLQESIGKGRFGEVWRGKWRGEEVAVEIFSSREERSWFREAEIYQTVMLRHENILGFIAADNKDNGTWTQLWLVSDYHEHGSLFDYLNRYTVTVEGMIKLALSTASGLAHLHMEIVGTQGKPAIAHRDLKSKNILVKKNGTCCIADLGLAVRHDSATDTIDIAPNHRVGTKRYMAPEVLDDSINMKHFESFKRADIYAMGLVFWEIARRCSIGGIHEDYQLPYYDLVPSDPSVEEMRKVVCEQKLRPNIPNRWQSCEALRVMAKIMRECWYANGAARLTALRIKKTLSQLSQQEGIKM

SEQ ID NO: 543 - protein, 503 aa, Homo sapiens
MEAAVAAPRPRLLLLVLAAAAAAAAALLPGATALQCFCHLCTKDNFTCVTDGLCFVSVTETTDKVIHNSMCIAEIDLIPRDRPFVCAPSSKTGSVTTTYCCNQDHCNKIELPTTVKSSPGLGPVELAAVIAGPVCFVCISLMLMVYICHNRTVIHHRVPNEEDPSLDRPFISEGTTLKDLIYDMTTSGSGSGLPLLVQRTIARTIVLQESIGKGRFGEVWRGKWRGEEVAVKIFSSREERLWFREAEIYQTVMLRHENILGFIAADNKDNGTWTQLWLVSDYHEHGSLFDYLNRYTVTVEGMIKLALSTASGLAHLHMEIVGTQGKPAIAHRDLKSKNILVKKNGTCCIADLGLAVRHDSATDTIDIAPNHRVGTKRYMAPEVLDDSINMKHFESFKRADIYAMGLVFWEIARRCSIGGIHEDYQLPYYDLVPSDPSVEEMRKVVCEQKLRPNIPNRWQSCEALRVMAKIMRECWYANGAARLTALRIKKTLSQLSQQEGIKM

SEQ ID NO: 544 - protein, 503 aa, Homo sapiens
MEAAVAAPRPRLLLLVLAAAAAAAAALLPGATALQCFCHLCTKDNFTCVTDGLCFVSVTETTDKVIHNSMCIAEIDLIPRDRPFVCAPSSKTGSVTTTYCCNQDHCNKIELPTTVKSSPGLGPVELAAVIAGPVCFVCISLMLMVYICHNRTVIHHRVPNEEDPSLDRPFISEGTTLKDLIYDMTTSGSGSGLPLLVQRTIARTIVLQESIGKGRFGEVWRGKWRGEEVAVKIFSSREERSWFREAEIYQTVMLRHENILGFIAADNKDNGTWTQLWLVSDYHEHGSLFDYLNRYTVTVEGMIKLALSTASGLAHLHREIVGTQGKPAIAHRDLKSKNILVKKNGTCCIADLGLAVRHDSATDTIDIAPNHRVGTKRYMAPEVLDDSINMKHFESFKRADIYAMGLVFWEIARRCSIGGIHEDYQLPYYDLVPSDPSVEEMRKVVCEQKLRPNIPNRWQSCEALRVMAKIMRECWYANGAARLTALRIKKTLSQLSQQEGIKM

SEQ ID NO: 545 - protein, 503 aa, Homo sapiens
MEAAVAAPRPRLLLLVLAAAAAAAAALLPGATALQCFCHLCTKDNFTCVTDGLCFVSVTETTDKVIHNSMCIAEIDLIPRDRPFVCAPSSKTGSVTTTYCCNQDHCNKIELPTTVKSSPGLGPVELAAVIAGPVCFVCISLMLMVYICHNRTVIHHRVPNEEDPSLDRPFISEGTTLKDLIYDMTTSGSGSGLPLLVQRTIARTIVLQESIGKGRFGEVWRGKWRGEEVAVKIFSSREERSWFREAEIYQTVMLRHENILGFIAADNKDNGTWTQLWLVSDYHEHGSLFDYLNRYTVTVEGMIKLALSTASGLAHLHMEIVGTQGKPAIAHRDLKSKNILVKKNGTCCIADLVLAVRHDSATDTIDIAPNHRVGTKRYMAPEVLDDSINMKHFESFKRADIYAMGLVFWEIARRCSIGGIHEDYQLPYYDLVPSDPSVEEMRKVVCEQKLRPNIPNRWQSCEALRVMAKIMRECWYANGAARLTALRIKKTLSQLSQQEGIKM

SEQ ID NO: 546 - protein, 503 aa, Homo sapiens
MEAAVAAPRPRLLLLVLAAAAAAAAALLPGATALQCFCHLCTKDNFTCVTDGLCFVSVTETTDKVIHNSMCIAEIDLIPRDRPFVCAPSSKTGSVTTTYCCNQDHCNKIELPTTVKSSPGLGPVELAAVIAGPVCFVCISLMLMVYICHNRTVIHHRVPNEEDPSLDRPFISEGTTLKDLIYDMTTSGSGSGLPLLVQRTIARTIVLQESIGKGRFGEVWRGKWRGEEVAVKIFSSREERSWFREAEIYQTVMLRHENILGFIAADNKDNGTWTQLWLVSDYHEHGSLFDYLNRYTVTVEGMIKLALSTASGLAHLHMEIVGTQGKPAIAHRDLKSKNILVKKNGTCCIADLGLAVRHDSATDTIDIAPNHRVGTKRYMAPEVLDDSINMKHFESFKRAGIYAMGLVFWEIARRCSIGGIHEDYQLPYYDLVPSDPSVEEMRKVVCEQKLRPNIPNRWQSCEALRVMAKIMRECWYANGAARLTALRIKKTLSQLSQQEGIKM

SEQ ID NO: 547 - protein, 503 aa, Homo sapiens
MEAAVAAPRPRLLLLVLAAAAAAAAALLPGATALQCFCHLCTKDNFTCVTDGLCFVSVTETTDKVIHNSMCIAEIDLIPRDRPFVCAPSSKTGSVTTTYCCNQDHCNKIELPTTVKSSPGLGPVELAAVIAGPVCFVCISLMLMVYICHNRTVIHHRVPNEEDPSLDRPFISEGTTLKDLIYDMTTSGSGSGLPLLVQRTIARTIVLQESIGKGRFGEVWRGKWRGEEVAVKIFSSREERSWFREAEIYQTVMLRHENILGFIAADNKDNGTWTQLWLVSDYHEHGSLFDYLNRYTVTVEGMIKLALSTASGLAHLHMEIVGTQGKPAIAHRDLKSKNILVKKNGTCCIADLGLAVRHDSATDTIDIAPNHRVGTKRYMAPEVLDDSINMKHFESFKRADIYAMGLVFWEIARRCSIGGIHEDYQLPYYDLVPSDPSVEEMRKVVCEQKLRPNIPNRWQSCEALRVMAKIMRECWYAPGAARLTALRIKKTLSQLSQQEGIKM

SEQ ID NO: 548 - protein, 194 aa, Homo sapiens
MGRGLLRGLWPLHIVLWTRIASTIPPHVQKSVNNDMIVTDNNGAVKFPQLCKFCDVRFSTCDNQKSCMSNCSITSICEKPQEVCVAVWRKNDENITLETVCHDPKLPYHDFILEDAASPKCIMKEKKKPGETFFMCSCSSDECNDNIIFSEEYNTSNPDLLLVIFQVTGISLLPPLGVAISVIIIFYCYRVNRQ

SEQ ID NO: 549 - protein, 187 aa, Homo sapiens
MGRGLLRGLWPLHIVLWTRIASTIPPHVQKSVNNDMIVTDNNGAVKFPQLCKFCDVRFSTCDNQKSCMSNCSITSICEKPQEVCVAVWRKNDENITLETVCHDPKLPYHDFILEDAASPKCIMKEKKKPGETFFMCSCSSDECNDNIIFSEEYNTSNPDLLLVIFQVTGISLLPPLGVAISVIIIFY

SEQ ID NO: 550 - protein, 567 aa, Homo sapiens
MGRGLLRGLWPLHIVLWTRIASTIPPHVQKSVNNDMIVTDNNGAVKFPQLCKFCDVRFSTCDNQKSCMSNCSITSICEKPQEVCVAVWRKNDENITLETVCHDPKLPYHDFILEDAASPKCIMKEKKKPGETFFMCSCSSDECNDNIIFSEEYNTSNPDLLLVIFQVTGISLLPPLGVAISVIIIFYCYRVNRQQKLSSTWETGKTRKLMEFSEHCAIILEDDRSDISSTCANNINHNTELLPIELDTLVGKGRFAEVYKAKLKQNTSEQFETVAVKIFPYEEYASWKTEKDIFSDINLKHENILQFLTAEERKTELGKQYWLITAFHAKGNLQEYLTRHVISWEDLRKLGSSLARGIAHLHSDHTPCGRPKMPIVHRDLKSSNILVKNDLTCCLCDFGLSLRLDPTLSVDDLANSGQVGTARYMAPEVLESRMNLENVESFKQTDVYSMALVLWEMTSRCNAVGEVKDYEPPFGSKVREHPCVESMKDNVLRDRGRPEIPSFWLNHQGIQMVCETLTECWDHDPEARLTAQCVAECFSELEHLDRLSGRSCSEEKIPEDGSLNTTK

SEQ ID NO: 551 - protein, 567 aa, Homo sapiens
MGRGLLRGLWPLHIVLWTRIASTIPPHVQKSVNNDMIVTDNNGAVKFPQLCKFCDVRFSTCDNQKSCMSNCSITSICEKPQEVCVAVWRKNDENITLETVCHDPKLPYHDFILEDAASPKCIMKEKKKPGETFFMCSCSSDECNDNIIFSEEYNTSNPDLLLVIFQVTGISLLPPLGVAISVIIIFYCYRVNRQQKLSSTWETGKTRKLMEFSEHCAIILEDDRSDISSTCANNINHNTELLPIELDTLVGKGRFAEVYKAKLKQNTSEQFETVAVKIFPYEEYASWKTEKDIFSDINLKHENILQFLTAEERKTELGKQYWLITAFHAKGNLQEYLTRHVISWEDLRKLGSSLARGIAHLHSDHTPCGRPKMPIVHRDLKSSNILVKNDLTCCLCDFGLSLRLDPTLSVDDLANSGQVGTARYMAPEVLESRMNLENVESFKQTDVYSMALVLWEMTSRCNAVGEVKDYEPPFGSKVREHPCVESMKDNVLRDRGRPEIPSFWLNHQGIQMVCETLTECWDHDPEAHLTAQCVAERFSELEHLDRLSGRSCSEEKIPEDGSLNTTK

SEQ ID NO: 552 - protein, 567 aa, Homo sapiens
MGRGLLRGLWPLHIVLWTRIASTIPPHVQKSVNNDMIVTDNNGAVKFPQLCKFCDVRFSTCDNQKSCMSNCSITSICEKPQEVCVAVWRKNDENITLETVCHDPKLPYHDFILEDAASPKCIMKEKKKPGETFFMCSCSSDECNDNIIFSEEYNTSNPDLLLVIFQVTGISLLPPLGVAISVIIIFYCYRVNRQQKLSSTWETGKTRKLMEFSEHCAIILEDDRSDISSTCANNINHNTELLPIELDTLVGKGRFAEVYKAKLKQNTSEQFETVAVKIFPYEEYASWKTEKDIFSDINLKHENILQFLTAEERKTELGKQYWLITAFHAKGNLQEYLTRHVISWEDLRKLGSSLARGIAHLHSDHTPCGRPKMPIVHRDLKSSNILVKNDLTCCLCDFGLSLRLDPTLSVDDLANSGQVGTARYMAPEVLESRMNLENVESFKQTDVYSMALVLWEMTSRCNAVGEVKDYEPPFGSKVREHPCVESMKDNVLRDRGRPEIPSFWLNHQGIQMVCETLTECWDHDPEACLTAQCVAERFSELEHLDRLSGRSCSEEKIPEDGSLNTTK

SEQ ID NO: 553 - protein, 567 aa, Homo sapiens
MGRGLLRGLWPLHIVLWTRIASTIPPHVQKSVNNDMIVTDNNGAVKFPQLCKFCDVRFSTCDNQKSCMSNCSITSICEKPQEVCVAVWRKNDENITLETVCHDPKLPYHDFILEDAASPKCIMKEKKKPGETFFMCSCSSDECNDNIIFSEEYNTSNPDLLLVIFQVTGISLLPPLGVAISVIIIFYCYRVNRQQKLSSTWETGKTRKLMEFSEHCAIILEDDRSDISSTCANNINHNTELLPIELDTLVGKGRFAEVYKAKLKQNTSEQFETVAVKIFPYEEYASWKTEKDIFSDINLKHENILQFLTAEERKTELGKQYWLITAFHAKGNLQEYLTRHVISWEDLRKLGSSLARGIAHLHSDHTPCGRPKMPIVHRDLKSSNILVKNDLTCCLCDFGLSLRLDPTLSVDDLANSGQVGTARYMAPEVLESRMNLENVESFKQTDVYSMALVLWEMTSCCNAVGEVKDYEPPFGSKVREHPCVESMKDNVLRDRGRPEIPSFWLNHQGIQMVCETLTECWDHDPEARLTAQCVAERFSELEHLDRLSGRSCSEEKIPEDGSLNTTK

SEQ ID NO: 554 - protein, 567 aa, Homo sapiens
MGRGLLRGLWPLHIVLWTRIASTIPPHVQKSVNNDMIVTDNNGAVKFPQLCKFCDVRFSTCDNQKSCMSNCSITSICEKPQEVCVAVWRKNDENITLETVCHDPKLPYHDFILEDAASPKCIMKEKKKPGETFFMCSCSSDECNDNIIFSEEYNTSNPDLLLVIFQVTGISLLPPLGVAISVIIIFYCYRVNRQQKLSSTWETGKTRKLMEFSEHCAIILEDDRSDISSTCANNINHNTELLPIELDTLVGKGRFAEVYKAKLKQNTSEQFETVAVKIFPYEEYASWKTEKDIFSDINLKHENILQFLTAEERKTELGKQYWLITAFHAKGNLQEYLTRHVISWEDLRKLGSSLARGIAHLHSDHTPCGRPKMPIVHRDLKSSNILVKNDLTCCLCDFGLSLRLDPTLSVDDLANSGQVGTARYMAPEVLESRMNLENVESFKQTDVYSMALVLWEMTSHCNAVGEVKDYEPPFGSKVREHPCVESMKDNVLRDRGRPEIPSFWLNHQGIQMVCETLTECWDHDPEARLTAQCVAERFSELEHLDRLSGRSCSEEKIPEDGSLNTTK

SEQ ID NO: 555 - protein, 567 aa, Homo sapiens
MGRGLLRGLWPLHIVLWTRIASTIPPHVQKSVNNDMIVTDNNGAVKFPQLCKFCDVRFSTCDNQKSCMSNCSITSICEKPQEVCVAVWRKNDENITLETVCHDPKLPYHDFILEDAASPKCIMKEKKKPGETFFMCSCSSDECNDNIIFSEEYNTSNPDLLLVIFQVTGISLLPPLGVAISVIIIFYCYRVNRQQKLSSTWETGKTRKLMEFSEHCAIILEDDRSDISSTCANNINHNTELLPIELDTLVGKGRFAEVYKAKLKQNTSEQFETVAVKIFPYEEYASWKTEKDIFSDINLKHENILQFLTAEERKTELGKQYWLITAFHAKGNLQEYLTRHVISWEDLRKLGSSLARGIAHLHSDHTPCGRPKMPIVHRDLKSSNILVKNDLTCCLCDFGLSLRLDPTLSVDDLANSGQVGTARYMAPEVLESRMNLENVESFKQTDVYSMALVLWEMTSRCNAVGEVKDYEPPFGSKVREHPCVESMKDNVLRDRGRPEIPSFWLNHQGIQMVCETLTECWDHDPEARLTAQCVAEHFSELEHLDRLSGRSCSEEKIPEDGSLNTTK

SEQ ID NO: 556 - protein, 295 aa, Artificial Sequence
  source: /note="Description of Artificial Sequence: Synthetic polypeptide"
MKTLPAMLGTGKLFWVFFLIPYLDIWNIHGKESCDVQLYIKRQSEHSILAGDPFELECPVKYCANRPHVTWCKLNGTTCVKLEDRQTSWKEEKNISFFILHFEPVLPNDNGSYRCSANFQSNLIESHSTTLYVTDVKSASERPSKDEMASRPWLLYRLLPLGGLPLLITTCFCLFCCLRRHQGRVKFSRSADAPAYQQGQNQLYNELNLGRREEYDVLDKRRGRDPEMGGKPRRKNPQEGLYNELQKDKMAEAYSEIGMKGERRRGKGHDGLYQGLSTATKDTYDALHMQALPPR

SEQ ID NO: 557 - protein, 265 aa, Artificial Sequence
  source: /note="Description of Artificial Sequence: Synthetic polypeptide"
KESCDVQLYIKRQSEHSILAGDPFELECPVKYCANRPHVTWCKLNGTTCVKLEDRQTSWKEEKNISFFILHFEPVLPNDNGSYRCSANFQSNLIESHSTTLYVTDVKSASERPSKDEMASRPWLLYRLLPLGGLPLLITTCFCLFCCLRRHQGRVKFSRSADAPAYQQGQNQLYNELNLGRREEYDVLDKRRGRDPEMGGKPRRKNPQEGLYNELQKDKMAEAYSEIGMKGERRRGKGHDGLYQGLSTATKDTYDALHMQALPPR

SEQ ID NO: 558 - protein, 382 aa, Artificial Sequence
  source: /note="Description of Artificial Sequence: Synthetic polypeptide"
MLCPWRTANLGLLLILTIFLVAASSSLCMDEKQITQNYSKVLAEVNTSWPVKMATNAVLCCPPIALRNLIIITWEIILRGQPSCTKAYRKETNETKETNCTDERITWVSRPDQNSDLQIRPVAITHDGYYRCIMVTPDGNFHRGYHLQVLVTPEVTLFQNRNRTAVCKAVAGKPAAQISWIPEGDCATKQEYWSNGTVTVKSTCHWEVHNVSTVTCHVSHLTGNKSLYIELLPVPGAKKSAKLYIPYIILTIIILTIVGFIWLLKVNGCRRVKFSRSADAPAYQQGQNQLYNELNLGRREEYDVLDKRRGRDPEMGGKPRRKNPQEGLYNELQKDKMAEAYSEIGMKGERRRGKGHDGLYQGLSTATKDTYDALHMQALPPR

SEQ ID NO: 559 - protein, 354 aa, Artificial Sequence
  source: /note="Description of Artificial Sequence: Synthetic polypeptide"
MDEKQITQNYSKVLAEVNTSWPVKMATNAVLCCPPIALRNLIIITWEIILRGQPSCTKAYRKETNETKETNCTDERITWVSRPDQNSDLQIRPVAITHDGYYRCIMVTPDGNFHRGYHLQVLVTPEVTLFQNRNRTAVCKAVAGKPAAQISWIPEGDCATKQEYWSNGTVTVKSTCHWEVHNVSTVTCHVSHLTGNKSLYIELLPVPGAKKSAKLYIPYIILTIIILTIVGFIWLLKVNGCRRVKFSRSADAPAYQQGQNQLYNELNLGRREEYDVLDKRRGRDPEMGGKPRRKNPQEGLYNELQKDKMAEAYSEIGMKGERRRGKGHDGLYQGLSTATKDTYDALHMQALPPR

SEQ ID NO: 560 - protein, 299 aa, Artificial Sequence
  source: /note="Description of Artificial Sequence: Synthetic polypeptide"
MACLGFQRHKAQLNLATRTWPCTLLFFLLFIPVFCKAMHVAQPAVVLASSRGIASFVCEYASPGKATEVRVTVLRQADSQVTEVCAATYMMGNELTFLDDSICTGTSSGNQVNLTIQGLRAMDTGLYICKVELMYPPPYYLGIGNGTQIYVIDPEPCPDSDFLLWILAAVSSGLFFYSFLLTAVSLSRVKFSRSADAPAYQQGQNQLYNELNLGRREEYDVLDKRRGRDPEMGGKPRRKNPQEGLYNELQKDKMAEAYSEIGMKGERRRGKGHDGLYQGLSTATKDTYDALHMQALPPR

SEQ ID NO: 561 - protein, 264 aa, Artificial Sequence
  source: /note="Description of Artificial Sequence: Synthetic polypeptide"
KAMHVAQPAVVLASSRGIASFVCEYASPGKATEVRVTVLRQADSQVTEVCAATYMMGNELTFLDDSICTGTSSGNQVNLTIQGLRAMDTGLYICKVELMYPPPYYLGIGNGTQIYVIDPEPCPDSDFLLWILAAVSSGLFFYSFLLTAVSLSRVKFSRSADAPAYQQGQNQLYNELNLGRREEYDVLDKRRGRDPEMGGKPRRKNPQEGLYNELQKDKMAEAYSEIGMKGERRRGKGHDGLYQGLSTATKDTYDALHMQALPPR

SEQ ID NO: 562 - protein, 308 aa, Artificial Sequence
  source: /note="Description of Artificial Sequence: Synthetic polypeptide"
MLGIWTLLPLVLTSVARLSSKSVNAQVTDINSKGLELRKTVTTVETQNLEGLHHDGQFCHKPCPPGERKARDCTVNGDEPDCVPCQEGKEYTDKAHFSSKCRRCRLCDEGHGLEVEINCTRTQNTKCRCKPNFFCNSTVCEHCDPCTKCEHGIIKECTLTSNTKCKEEGSRSNLGWLCLLLLPIPLIVWVKRKEVQRVKFSRSADAPAYQQGQNQLYNELNLGRREEYDVLDKRRGRDPEMGGKPRRKNPQEGLYNELQKDKMAEAYSEIGMKGERRRGKGHDGLYQGLSTATKDTYDALHMQALPPR

SEQ ID NO: 563 - protein, 283 aa, Artificial Sequence
  source: /note="Description of Artificial Sequence: Synthetic polypeptide"
QVTDINSKGLELRKTVTTVETQNLEGLHHDGQFCHKPCPPGERKARDCTVNGDEPDCVPCQEGKEYTDKAHFSSKCRRCRLCDEGHGLEVEINCTRTQNTKCRCKPNFFCNSTVCEHCDPCTKCEHGIIKECTLTSNTKCKEEGSRSNLGWLCLLLLPIPLIVWVKRKEVQRVKFSRSADAPAYQQGQNQLYNELNLGRREEYDVLDKRRGRDPEMGGKPRRKNPQEGLYNELQKDKMAEAYSEIGMKGERRRGKGHDGLYQGLSTATKDTYDALHMQALPPR

SEQ ID NO: 564 - protein, 375 aa, Artificial Sequence
  source: /note="Description of Artificial Sequence: Synthetic polypeptide"
MLPCLVVLLAALLSLRLGSDAHGTELPSPPSVWFEAEFFHHILHWTPIPNQSESTCYEVALLRYGIESWNSISNCSQTLSYDLTAVTLDLYHSNGYRARVRAVDGSRHSNWTVTNTRFSVDEVTLTVGSVNLEIHNGFILGKIQLPRPKMAPANDTYESIFSHFREYEIAIRKVPGNFTFTHKKVKHENFSLLTSGEVGEFCVQVKPSVASRSNKGMWSKEECISLTRQYFTVTNVIIFFAFVLLLSGALAYCLALQLYVRRRRVKFSRSADAPAYQQGQNQLYNELNLGRREEYDVLDKRRGRDPEMGGKPRRKNPQEGLYNELQKDKMAEAYSEIGMKGERRRGKGHDGLYQGLSTATKDTYDALHMQALPPR

SEQ ID NO: 565 - protein, 354 aa, Artificial Sequence
  source: /note="Description of Artificial Sequence: Synthetic polypeptide"
HGTELPSPPSVWFEAEFFHHILHWTPIPNQSESTCYEVALLRYGIESWNSISNCSQTLSYDLTAVTLDLYHSNGYRARVRAVDGSRHSNWTVTNTRFSVDEVTLTVGSVNLEIHNGFILGKIQLPRPKMAPANDTYESIFSHFREYEIAIRKVPGNFTFTHKKVKHENFSLLTSGEVGEFCVQVKPSVASRSNKGMWSKEECISLTRQYFTVTNVIIFFAFVLLLSGALAYCLALQLYVRRRRVKFSRSADAPAYQQGQNQLYNELNLGRREEYDVLDKRRGRDPEMGGKPRRKNPQEGLYNELQKDKMAEAYSEIGMKGERRRGKGHDGLYQGLSTATKDTYDALHMQALPPR

SEQ ID NO: 566 - protein, 361 aa, Artificial Sequence
  source: /note="Description of Artificial Sequence: Synthetic polypeptide"
MAWSLGSWLGGCLLVSALGMVPPPENVRMNSVNFKNILQWESPAFAKGNLTFTAQYLSYRIFQDKCMNTTLTECDFSSLSKYGDHTLRVRAEFADEHSDWVNITFCPVDDTIIGPPGMQVEVLADSLHMRFLAPKIENEYETWTMKNVYNSWTYNVQYWKNGTDEKFQITPQYDFEVLRNLEPWTTYCVQVRGFLPDRNKAGEWSEPVCEQTTHDETVPSWMVAVILMASVFMVCLALLGCFALLWCVYRVKFSRSADAPAYQQGQNQLYNELNLGRREEYDVLDKRRGRDPEMGGKPRRKNPQEGLYNELQKDKMAEAYSEIGMKGERRRGKGHDGLYQGLSTATKDTYDALHMQALPPR

SEQ ID NO: 567 - protein, 342 aa, Artificial Sequence
  source: /note="Description of Artificial Sequence: Synthetic polypeptide"
MVPPPENVRMNSVNFKNILQWESPAFAKGNLTFTAQYLSYRIFQDKCMNTTLTECDFSSLSKYGDHTLRVRAEFADEHSDWVNITFCPVDDTIIGPPGMQVEVLADSLHMRFLAPKIENEYETWTMKNVYNSWTYNVQYWKNGTDEKFQITPQYDFEVLRNLEPWTTYCVQVRGFLPDRNKAGEWSEPVCEQTTHDETVPSWMVAVILMASVFMVCLALLGCFALLWCVYRVKFSRSADAPAYQQGQNQLYNELNLGRREEYDVLDKRRGRDPEMGGKPRRKNPQEGLYNELQKDKMAEAYSEIGMKGERRRGKGHDGLYQGLSTATKDTYDALHMQALPPR

SEQ ID NO: 568 - protein, 759 aa, Artificial Sequence
  source: /note="Description of Artificial Sequence: Synthetic polypeptide"
MLTLQTWLVQALFIFLTTESTGELLDPCGYISPESPVVQLHSNFTAVCVLKEKCMDYFHVNANYIVWKTNHFTIPKEQYTIINRTASSVTFTDIASLNIQLTCNILTFGQLEQNVYGITIISGLPPEKPKNLSCIVNEGKKMRCEWDGGRETHLETNFTLKSEWATHKFADCKAKRDTPTSCTVDYSTVYFVNIEVWVEAENALGKVTSDHINFDPVYKVKPNPPHNLSVINSEELSSILKLTWTNPSIKSVIILKYNIQYRTKDASTWSQIPPEDTASTRSSFTVQDLKPFTEYVFRIRCMKEDGKGYWSDWSEEASGITYEDRPSKAPSFWYKIDPSHTQGYRTVQLVWKTLPPFEANGKILDYEVTLTRWKSHLQNYTVNATKLTVNLTNDRYLATLTVRNLVGKSDAAVLTIPACDFQATHPVMDLKAFPKDNMLWVEWTTPRESVKKYILEWCVLSDKAPCITDWQQEDGTVHRTYLRGNLAESKCYLITVTPVYADGPGSPESIKAYLKQAPPSKGPTVRTKKVGKNEAVLEWDQLPVDVQNGFIRNYTIFYRTIIGNETAVNVDSSHTEYTLSSLTSDTLYMVRMAAYTDEGGKDGPEFTFTTPKFAQGEIEAIVVPVCLAFLLTTLLGVLFCFNKRDLIRVKFSRSADAPAYQQGQNQLYNELNLGRREEYDVLDKRRGRDPEMGGKPRRKNPQEGLYNELQKDKMAEAYSEIGMKGERRRGKGHDGLYQGLSTATKDTYDALHMQALPPR

SEQ ID NO: 569 - protein, 737 aa, Artificial Sequence
  source: /note="Description of Artificial Sequence: Synthetic polypeptide"
ELLDPCGYISPESPVVQLHSNFTAVCVLKEKCMDYFHVNANYIVWKTNHFTIPKEQYTIINRTASSVTFTDIASLNIQLTCNILTFGQLEQNVYGITIISGLPPEKPKNLSCIVNEGKKMRCEWDGGRETHLETNFTLKSEWATHKFADCKAKRDTPTSCTVDYSTVYFVNIEVWVEAENALGKVTSDHINFDPVYKVKPNPPHNLSVINSEELSSILKLTWTNPSIKSVIILKYNIQYRTKDASTWSQIPPEDTASTRSSFTVQDLKPFTEYVFRIRCMKEDGKGYWSDWSEEASGITYEDRPSKAPSFWYKIDPSHTQGYRTVQLVWKTLPPFEANGKILDYEVTLTRWKSHLQNYTVNATKLTVNLTNDRYLATLTVRNLVGKSDAAVLTIPACDFQATHPVMDLKAFPKDNMLWVEWTTPRESVKKYILEWCVLSDKAPCITDWQQEDGTVHRTYLRGNLAESKCYLITVTPVYADGPGSPESIKAYLKQAPPSKGPTVRTKKVGKNEAVLEWDQLPVDVQNGFIRNYTIFYRTIIGNETAVNVDSSHTEYTLSSLTSDTLYMVRMAAYTDEGGKDGPEFTFTTPKFAQGEIEAIVVPVCLAFLLTTLLGVLFCFNKRDLIRVKFSRSADAPAYQQGQNQLYNELNLGRREEYDVLDKRRGRDPEMGGKPRRKNPQEGLYNELQKDKMAEAYSEIGMKGERRRGKGHDGLYQGLSTATKDTYDALHMQALPPR

SEQ ID NO: 570 - protein, 334 aa, Artificial Sequence
  source: /note="Description of Artificial Sequence: Synthetic polypeptide"
MQIPQAPWPVVWAVLQLGWRPGWMQIPQAPWPVVWAVLQLGWRPGWFLDSPDRPWNPPTFSPALLVVTEGDNATFTCSFSNTSESFVLNWYRMSPSNQTDKLAAFPEDRSQPGQDCRFRVTQLPNGRDFHMSVVRARRNDSGTYLCGAISLAPKAQIKESLRAELRVTERRAEVPTAHPSPSPRPAGQFQTLVVVGVVGGLLGSLVLLVWVLAVICSRAARGRVKFSRSADAPAYQQGQNQLYNELNLGRREEYDVLDKRRGRDPEMGGKPRRKNPQEGLYNELQKDKMAEAYSEIGMKGERRRGKGHDGLYQGLSTATKDTYDALHMQALPPR

SEQ ID NO: 571 - protein, 311 aa, Artificial Sequence
  source: /note="Description of Artificial Sequence: Synthetic polypeptide"
MQIPQAPWPVVWAVLQLGWRPGWFLDSPDRPWNPPTFSPALLVVTEGDNATFTCSFSNTSESFVLNWYRMSPSNQTDKLAAFPEDRSQPGQDCRFRVTQLPNGRDFHMSVVRARRNDSGTYLCGAISLAPKAQIKESLRAELRVTERRAEVPTAHPSPSPRPAGQFQTLVVVGVVGGLLGSLVLLVWVLAVICSRAARGRVKFSRSADAPAYQQGQNQLYNELNLGRREEYDVLDKRRGRDPEMGGKPRRKNPQEGLYNELQKDKMAEAYSEIGMKGERRRGKGHDGLYQGLSTATKDTYDALHMQALPPR

SEQ ID NO: 572 - protein, 657 aa, Artificial Sequence
  source: /note="Description of Artificial Sequence: Synthetic polypeptide"
MEKKWKYCAVYYIIQIHFVKGVWEKTVNTEENVYATLGSDVNLTCQTQTVGFFVQMQWSKVTNKIDLIAVYHPQYGFYCAYGRPCESLVTFTETPENGSKWTLHLRNMSCSVSGRYECMLVLYPEGIQTKIYNLLIQTHVTADEWNSNHTIEIEINQTLEIPCFQNSSSKISSEFTYAWSVENSSTDSWVLLSKGIKEDNGTQETLISQNHLISNSTLLKDRVKLGTDYRLHLSPVQIFDDGRKFSCHIRVGPNKILRSSTTVKVFAKPEIPVIVENNSTDVLVERRFTCLLKNVFPKANITWFIDGSFLHDEKEGIYITNEERKGKDGFLELKSVLTRVHSNKPAQSDNLTIWCMALSPVPGNKVWNISSEKITFLLGSEISSTDPPLSVTESTLDTQPSPASSVSPARYPATSSVTLVDVSALRPNTTPQPSNSSMTTRGFNYPWTSSGTDTKKSVSRIPSETYSSSPSGAGSTLHDNVFTSTARAFSEVPTTANGSTKTNHVHITGIVVNKPKDGMSWPVIVAALLFCCMILFGLGVRKWCQRVKFSRSADAPAYQQGQNQLYNELNLGRREEYDVLDKRRGRDPEMGGKPRRKNPQEGLYNELQKDKMAEAYSEIGMKGERRRGKGHDGLYQGLSTATKDTYDALHMQALPPR

SEQ ID NO: 573 - protein, 636 aa, Artificial Sequence
  source: /note="Description of Artificial Sequence: Synthetic polypeptide"
VWEKTVNTEENVYATLGSDVNLTCQTQTVGFFVQMQWSKVTNKIDLIAVYHPQYGFYCAYGRPCESLVTFTETPENGSKWTLHLRNMSCSVSGRYECMLVLYPEGIQTKIYNLLIQTHVTADEWNSNHTIEIEINQTLEIPCFQNSSSKISSEFTYAWSVENSSTDSWVLLSKGIKEDNGTQETLISQNHLISNSTLLKDRVKLGTDYRLHLSPVQIFDDGRKFSCHIRVGPNKILRSSTTVKVFAKPEIPVIVENNSTDVLVERRFTCLLKNVFPKANITWFIDGSFLHDEKEGIYITNEERKGKDGFLELKSVLTRVHSNKPAQSDNLTIWCMALSPVPGNKVWNISSEKITFLLGSEISSTDPPLSVTESTLDTQPSPASSVSPARYPATSSVTLVDVSALRPNTTPQPSNSSMTTRGFNYPWTSSGTDTKKSVSRIPSETYSSSPSGAGSTLHDNVFTSTARAFSEVPTTANGSTKTNHVHITGIVVNKPKDGMSWPVIVAALLFCCMILFGLGVRKWCQRVKFSRSADAPAYQQGQNQLYNELNLGRREEYDVLDKRRGRDPEMGGKPRRKNPQEGLYNELQKDKMAEAYSEIGMKGERRRGKGHDGLYQGLSTATKDTYDALHMQALPPR

SEQ ID NO: 574 - protein, 281 aa, Artificial Sequence
  source: /note="Description of Artificial Sequence: Synthetic polypeptide"
MRWCLLLIWAQGLRQAPLASGMMTGTIETTGNISAEKGGSIILQCHLSSTTAQVTQVNWEQQDQLLAICNADLGWHISPSFKDRVAPGPGLGLTLQSLTVNDTGEYFCIYHTYPDGTYTGRIFLEVLESSVAEHGARFQIPLLGAMAATLVVICTAVIVVVALTRKKKARVKFSRSADAPAYQQGQNQLYNELNLGRREEYDVLDKRRGRDPEMGGKPRRKNPQEGLYNELQKDKMAEAYSEIGMKGERRRGKGHDGLYQGLSTATKDTYDALHMQALPPR

SEQ ID NO: 575 - protein, 260 aa, Artificial Sequence
  source: /note="Description of Artificial Sequence: Synthetic polypeptide"
MMTGTIETTGNISAEKGGSIILQCHLSSTTAQVTQVNWEQQDQLLAICNADLGWHISPSFKDRVAPGPGLGLTLQSLTVNDTGEYFCIYHTYPDGTYTGRIFLEVLESSVAEHGARFQIPLLGAMAATLVVICTAVIVVVALTRKKKARVKFSRSADAPAYQQGQNQLYNELNLGRREEYDVLDKRRGRDPEMGGKPRRKNPQEGLYNELQKDKMAEAYSEIGMKGERRRGKGHDGLYQGLSTATKDTYDALHMQALPPR

SEQ ID NO: 576 - protein, 296 aa, Artificial Sequence
  source: /note="Description of Artificial Sequence: Synthetic polypeptide"
MKTLPAMLGTGKLFWVFFLIPYLDIWNIHGKESCDVQLYIKRQSEHSILAGDPFELECPVKYCANRPHVTWCKLNGTTCVKLEDRQTSWKEEKNISFFILHFEPVLPNDNGSYRCSANFQSNLIESHSTTLYVTDVKSASERPSKDEMASRPWLLYRFWVLVVVGGVLACYSLLVTVAFIIFWVRVKFSRSADAPAYQQGQNQLYNELNLGRREEYDVLDKRRGRDPEMGGKPRRKNPQEGLYNELQKDKMAEAYSEIGMKGERRRGKGHDGLYQGLSTATKDTYDALHMQALPPR

SEQ ID NO: 577 - protein, 266 aa, Artificial Sequence
  source: /note="Description of Artificial Sequence: Synthetic polypeptide"
KESCDVQLYIKRQSEHSILAGDPFELECPVKYCANRPHVTWCKLNGTTCVKLEDRQTSWKEEKNISFFILHFEPVLPNDNGSYRCSANFQSNLIESHSTTLYVTDVKSASERPSKDEMASRPWLLYRFWVLVVVGGVLACYSLLVTVAFIIFWVRVKFSRSADAPAYQQGQNQLYNELNLGRREEYDVLDKRRGRDPEMGGKPRRKNPQEGLYNELQKDKMAEAYSEIGMKGERRRGKGHDGLYQGLSTATKDTYDALHMQALPPR

SEQ ID NO: 578 - protein, 382 aa, Artificial Sequence
  source: /note="Description of Artificial Sequence: Synthetic polypeptide"
MLCPWRTANLGLLLILTIFLVAASSSLCMDEKQITQNYSKVLAEVNTSWPVKMATNAVLCCPPIALRNLIIITWEIILRGQPSCTKAYRKETNETKETNCTDERITWVSRPDQNSDLQIRPVAITHDGYYRCIMVTPDGNFHRGYHLQVLVTPEVTLFQNRNRTAVCKAVAGKPAAQISWIPEGDCATKQEYWSNGTVTVKSTCHWEVHNVSTVTCHVSHLTGNKSLYIELLPVPGAKKSAKLFWVLVVVGGVLACYSLLVTVAFIIFWVRVKFSRSADAPAYQQGQNQLYNELNLGRREEYDVLDKRRGRDPEMGGKPRRKNPQEGLYNELQKDKMAEAYSEIGMKGERRRGKGHDGLYQGLSTATKDTYDALHMQALPPR

SEQ ID NO: 579 - protein, 354 aa, Artificial Sequence
  source: /note="Description of Artificial Sequence: Synthetic polypeptide"
MDEKQITQNYSKVLAEVNTSWPVKMATNAVLCCPPIALRNLIIITWEIILRGQPSCTKAYRKETNETKETNCTDERITWVSRPDQNSDLQIRPVAITHDGYYRCIMVTPDGNFHRGYHLQVLVTPEVTLFQNRNRTAVCKAVAGKPAAQISWIPEGDCATKQEYWSNGTVTVKSTCHWEVHNVSTVTCHVSHLTGNKSLYIELLPVPGAKKSAKLFWVLVVVGGVLACYSLLVTVAFIIFWVRVKFSRSADAPAYQQGQNQLYNELNLGRREEYDVLDKRRGRDPEMGGKPRRKNPQEGLYNELQKDKMAEAYSEIGMKGERRRGKGHDGLYQGLSTATKDTYDALHMQALPPR

SEQ ID NO: 580 - protein, 300 aa, Artificial Sequence
  source: /note="Description of Artificial Sequence: Synthetic polypeptide"
MACLGFQRHKAQLNLATRTWPCTLLFFLLFIPVFCKAMHVAQPAVVLASSRGIASFVCEYASPGKATEVRVTVLRQADSQVTEVCAATYMMGNELTFLDDSICTGTSSGNQVNLTIQGLRAMDTGLYICKVELMYPPPYYLGIGNGTQIYVIDPEPCPDSDFWVLVVVGGVLACYSLLVTVAFIIFWVRVKFSRSADAPAYQQGQNQLYNELNLGRREEYDVLDKRRGRDPEMGGKPRRKNPQEGLYNELQKDKMAEAYSEIGMKGERRRGKGHDGLYQGLSTATKDTYDALHMQALPPR

SEQ ID NO: 581 - protein, 265 aa, Artificial Sequence
  source: /note="Description of Artificial Sequence: Synthetic polypeptide"
KAMHVAQPAVVLASSRGIASFVCEYASPGKATEVRVTVLRQADSQVTEVCAATYMMGNELTFLDDSICTGTSSGNQVNLTIQGLRAMDTGLYICKVELMYPPPYYLGIGNGTQIYVIDPEPCPDSDFWVLVVVGGVLACYSLLVTVAFIIFWVRVKFSRSADAPAYQQGQNQLYNELNLGRREEYDVLDKRRGRDPEMGGKPRRKNPQEGLYNELQKDKMAEAYSEIGMKGERRRGKGHDGLYQGLSTATKDTYDALHMQALPPR

SEQ ID NO: 582 - protein, 312 aa, Artificial Sequence
  source: /note="Description of Artificial Sequence: Synthetic polypeptide"
MLGIWTLLPLVLTSVARLSSKSVNAQVTDINSKGLELRKTVTTVETQNLEGLHHDGQFCHKPCPPGERKARDCTVNGDEPDCVPCQEGKEYTDKAHFSSKCRRCRLCDEGHGLEVEINCTRTQNTKCRCKPNFFCNSTVCEHCDPCTKCEHGIIKECTLTSNTKCKEEGSRSNFWVLVVVGGVLACYSLLVTVAFIIFWVRVKFSRSADAPAYQQGQNQLYNELNLGRREEYDVLDKRRGRDPEMGGKPRRKNPQEGLYNELQKDKMAEAYSEIGMKGERRRGKGHDGLYQGLSTATKDTYDALHMQALPPR

SEQ ID NO: 583 - protein, 287 aa, Artificial Sequence
  source: /note="Description of Artificial Sequence: Synthetic polypeptide"
QVTDINSKGLELRKTVTTVETQNLEGLHHDGQFCHKPCPPGERKARDCTVNGDEPDCVPCQEGKEYTDKAHFSSKCRRCRLCDEGHGLEVEINCTRTQNTKCRCKPNFFCNSTVCEHCDPCTKCEHGIIKECTLTSNTKCKEEGSRSNFWVLVVVGGVLACYSLLVTVAFIIFWVRVKFSRSADAPAYQQGQNQLYNELNLGRREEYDVLDKRRGRDPEMGGKPRRKNPQEGLYNELQKDKMAEAYSEIGMKGERRRGKGHDGLYQGLSTATKDTYDALHMQALPPR

SEQ ID NO: 584 - protein, 374 aa, Artificial Sequence
  source: /note="Description of Artificial Sequence: Synthetic polypeptide"
MLPCLVVLLAALLSLRLGSDAHGTELPSPPSVWFEAEFFHHILHWTPIPNQSESTCYEVALLRYGIESWNSISNCSQTLSYDLTAVTLDLYHSNGYRARVRAVDGSRHSNWTVTNTRFSVDEVTLTVGSVNLEIHNGFILGKIQLPRPKMAPANDTYESIFSHFREYEIAIRKVPGNFTFTHKKVKHENFSLLTSGEVGEFCVQVKPSVASRSNKGMWSKEECISLTRQYFTVTNFWVLVVVGGVLACYSLLVTVAFIIFWVRVKFSRSADAPAYQQGQNQLYNELNLGRREEYDVLDKRRGRDPEMGGKPRRKNPQEGLYNELQKDKMAEAYSEIGMKGERRRGKGHDGLYQGLSTATKDTYDALHMQALPPR

SEQ ID NO: 585 - protein, 353 aa, Artificial Sequence
  source: /note="Description of Artificial Sequence: Synthetic polypeptide"
HGTELPSPPSVWFEAEFFHHILHWTPIPNQSESTCYEVALLRYGIESWNSISNCSQTLSYDLTAVTLDLYHSNGYRARVRAVDGSRHSNWTVTNTRFSVDEVTLTVGSVNLEIHNGFILGKIQLPRPKMAPANDTYESIFSHFREYEIAIRKVPGNFTFTHKKVKHENFSLLTSGEVGEFCVQVKPSVASRSNKGMWSKEECISLTRQYFTVTNFWVLVVVGGVLACYSLLVTVAFIIFWVRVKFSRSADAPAYQQGQNQLYNELNLGRREEYDVLDKRRGRDPEMGGKPRRKNPQEGLYNELQKDKMAEAYSEIGMKGERRRGKGHDGLYQGLSTATKDTYDALHMQALPPR

SEQ ID NO: 586 - protein, 359 aa, Artificial Sequence
  source: /note="Description of Artificial Sequence: Synthetic polypeptide"
MAWSLGSWLGGCLLVSALGMVPPPENVRMNSVNFKNILQWESPAFAKGNLTFTAQYLSYRIFQDKCMNTTLTECDFSSLSKYGDHTLRVRAEFADEHSDWVNITFCPVDDTIIGPPGMQVEVLADSLHMRFLAPKIENEYETWTMKNVYNSWTYNVQYWKNGTDEKFQITPQYDFEVLRNLEPWTTYCVQVRGFLPDRNKAGEWSEPVCEQTTHDETVPSFWVLVVVGGVLACYSLLVTVAFIIFWVRVKFSRSADAPAYQQGQNQLYNELNLGRREEYDVLDKRRGRDPEMGGKPRRKNPQEGLYNELQKDKMAEAYSEIGMKGERRRGKGHDGLYQGLSTATKDTYDALHMQALPPR

SEQ ID NO: 587 - protein, 340 aa, Artificial Sequence
  source: /note="Description of Artificial Sequence: Synthetic polypeptide"
MVPPPENVRMNSVNFKNILQWESPAFAKGNLTFTAQYLSYRIFQDKCMNTTLTECDFSSLSKYGDHTLRVRAEFADEHSDWVNITFCPVDDTIIGPPGMQVEVLADSLHMRFLAPKIENEYETWTMKNVYNSWTYNVQYWKNGTDEKFQITPQYDFEVLRNLEPWTTYCVQVRGFLPDRNKAGEWSEPVCEQTTHDETVPSFWVLVVVGGVLACYSLLVTVAFIIFWVRVKFSRSADAPAYQQGQNQLYNELNLGRREEYDVLDKRRGRDPEMGGKPRRKNPQEGLYNELQKDKMAEAYSEIGMKGERRRGKGHDGLYQGLSTATKDTYDALHMQALPPR

SEQ ID NO: 588 - protein, 758 aa, Artificial Sequence
  source: /note="Description of Artificial Sequence: Synthetic polypeptide"
MLTLQTWLVQALFIFLTTESTGELLDPCGYISPESPVVQLHSNFTAVCVLKEKCMDYFHVNANYIVWKTNHFTIPKEQYTIINRTASSVTFTDIASLNIQLTCNILTFGQLEQNVYGITIISGLPPEKPKNLSCIVNEGKKMRCEWDGGRETHLETNFTLKSEWATHKFADCKAKRDTPTSCTVDYSTVYFVNIEVWVEAENALGKVTSDHINFDPVYKVKPNPPHNLSVINSEELSSILKLTWTNPSIKSVIILKYNIQYRTKDASTWSQIPPEDTASTRSSFTVQDLKPFTEYVFRIRCMKEDGKGYWSDWSEEASGITYEDRPSKAPSFWYKIDPSHTQGYRTVQLVWKTLPPFEANGKILDYEVTLTRWKSHLQNYTVNATKLTVNLTNDRYLATLTVRNLVGKSDAAVLTIPACDFQATHPVMDLKAFPKDNMLWVEWTTPRESVKKYILEWCVLSDKAPCITDWQQEDGTVHRTYLRGNLAESKCYLITVTPVYADGPGSPESIKAYLKQAPPSKGPTVRTKKVGKNEAVLEWDQLPVDVQNGFIRNYTIFYRTIIGNETAVNVDSSHTEYTLSSLTSDTLYMVRMAAYTDEGGKDGPEFTFTTPKFAQGEIEFWVLVVVGGVLACYSLLVTVAFIIFWVRVKFSRSADAPAYQQGQNQLYNELNLGRREEYDVLDKRRGRDPEMGGKPRRKNPQEGLYNELQKDKMAEAYSEIGMKGERRRGKGHDGLYQGLSTATKDTYDALHMQALPPR

SEQ ID NO: 589 - protein, 736 aa, Artificial Sequence
  source: /note="Description of Artificial Sequence: Synthetic polypeptide"
ELLDPCGYISPESPVVQLHSNFTAVCVLKEKCMDYFHVNANYIVWKTNHFTIPKEQYTIINRTASSVTFTDIASLNIQLTCNILTFGQLEQNVYGITIISGLPPEKPKNLSCIVNEGKKMRCEWDGGRETHLETNFTLKSEWATHKFADCKAKRDTPTSCTVDYSTVYFVNIEVWVEAENALGKVTSDHINFDPVYKVKPNPPHNLSVINSEELSSILKLTWTNPSIKSVIILKYNIQYRTKDASTWSQIPPEDTASTRSSFTVQDLKPFTEYVFRIRCMKEDGKGYWSDWSEEASGITYEDRPSKAPSFWYKIDPSHTQGYRTVQLVWKTLPPFEANGKILDYEVTLTRWKSHLQNYTVNATKLTVNLTNDRYLATLTVRNLVGKSDAAVLTIPACDFQATHPVMDLKAFPKDNMLWVEWTTPRESVKKYILEWCVLSDKAPCITDWQQEDGTVHRTYLRGNLAESKCYLITVTPVYADGPGSPESIKAYLKQAPPSKGPTVRTKKVGKNEAVLEWDQLPVDVQNGFIRNYTIFYRTIIGNETAVNVDSSHTEYTLSSLTSDTLYMVRMAAYTDEGGKDGPEFTFTTPKFAQGEIEFWVLVVVGGVLACYSLLVTVAFIIFWVRVKFSRSADAPAYQQGQNQLYNELNLGRREEYDVLDKRRGRDPEMGGKPRRKNPQEGLYNELQKDKMAEAYSEIGMKGERRRGKGHDGLYQGLSTATKDTYDALHMQALPPR

SEQ ID NO: 590 - protein, 333 aa, Artificial Sequence
  source: /note="Description of Artificial Sequence: Synthetic polypeptide"
MQIPQAPWPVVWAVLQLGWRPGWMQIPQAPWPVVWAVLQLGWRPGWFLDSPDRPWNPPTFSPALLVVTEGDNATFTCSFSNTSESFVLNWYRMSPSNQTDKLAAFPEDRSQPGQDCRFRVTQLPNGRDFHMSVVRARRNDSGTYLCGAISLAPKAQIKESLRAELRVTERRAEVPTAHPSPSPRPAGQFQTLVVFWVLVVVGGVLACYSLLVTVAFIIFWVRVKFSRSADAPAYQQGQNQLYNELNLGRREEYDVLDKRRGRDPEMGGKPRRKNPQEGLYNELQKDKMAEAYSEIGMKGERRRGKGHDGLYQGLSTATKDTYDALHMQALPPR

SEQ ID NO: 591 - protein, 310 aa, Artificial Sequence
  source: /note="Description of Artificial Sequence: Synthetic polypeptide"
MQIPQAPWPVVWAVLQLGWRPGWFLDSPDRPWNPPTFSPALLVVTEGDNATFTCSFSNTSESFVLNWYRMSPSNQTDKLAAFPEDRSQPGQDCRFRVTQLPNGRDFHMSVVRARRNDSGTYLCGAISLAPKAQIKESLRAELRVTERRAEVPTAHPSPSPRPAGQFQTLVVFWVLVVVGGVLACYSLLVTVAFIIFWVRVKFSRSADAPAYQQGQNQLYNELNLGRREEYDVLDKRRGRDPEMGGKPRRKNPQEGLYNELQKDKMAEAYSEIGMKGERRRGKGHDGLYQGLSTATKDTYDALHMQALPPR

SEQ ID NO: 592 - protein, 658 aa, Artificial Sequence
  source: /note="Description of Artificial Sequence: Synthetic polypeptide"
MEKKWKYCAVYYIIQIHFVKGVWEKTVNTEENVYATLGSDVNLTCQTQTVGFFVQMQWSKVTNKIDLIAVYHPQYGFYCAYGRPCESLVTFTETPENGSKWTLHLRNMSCSVSGRYECMLVLYPEGIQTKIYNLLIQTHVTADEWNSNHTIEIEINQTLEIPCFQNSSSKISSEFTYAWSVENSSTDSWVLLSKGIKEDNGTQETLISQNHLISNSTLLKDRVKLGTDYRLHLSPVQIFDDGRKFSCHIRVGPNKILRSSTTVKVFAKPEIPVIVENNSTDVLVERRFTCLLKNVFPKANITWFIDGSFLHDEKEGIYITNEERKGKDGFLELKSVLTRVHSNKPAQSDNLTIWCMALSPVPGNKVWNISSEKITFLLGSEISSTDPPLSVTESTLDTQPSPASSVSPARYPATSSVTLVDVSALRPNTTPQPSNSSMTTRGFNYPWTSSGTDTKKSVSRIPSETYSSSPSGAGSTLHDNVFTSTARAFSEVPTTANGSTKTNHVHITGIVVNKPKDGMFWVLVVVGGVLACYSLLVTVAFIIFWVRVKFSRSADAPAYQQGQNQLYNELNLGRREEYDVLDKRRGRDPEMGGKPRRKNPQEGLYNELQKDKMAEAYSEIGMKGERRRGKGHDGLYQGLSTATKDTYDALHMQALPPR

SEQ ID NO: 593 - protein, 637 aa, Artificial Sequence
  source: /note="Description of Artificial Sequence: Synthetic polypeptide"
VWEKTVNTEENVYATLGSDVNLTCQTQTVGFFVQMQWSKVTNKIDLIAVYHPQYGFYCAYGRPCESLVTFTETPENGSKWTLHLRNMSCSVSGRYECMLVLYPEGIQTKIYNLLIQTHVTADEWNSNHTIEIEINQTLEIPCFQNSSSKISSEFTYAWSVENSSTDSWVLLSKGIKEDNGTQETLISQNHLISNSTLLKDRVKLGTDYRLHLSPVQIFDDGRKFSCHIRVGPNKILRSSTTVKVFAKPEIPVIVENNSTDVLVERRFTCLLKNVFPKANITWFIDGSFLHDEKEGIYITNEERKGKDGFLELKSVLTRVHSNKPAQSDNLTIWCMALSPVPGNKVWNISSEKITFLLGSEISSTDPPLSVTESTLDTQPSPASSVSPARYPATSSVTLVDVSALRPNTTPQPSNSSMTTRGFNYPWTSSGTDTKKSVSRIPSETYSSSPSGAGSTLHDNVFTSTARAFSEVPTTANGSTKTNHVHITGIVVNKPKDGMFWVLVVVGGVLACYSLLVTVAFIIFWVRVKFSRSADAPAYQQGQNQLYNELNLGRREEYDVLDKRRGRDPEMGGKPRRKNPQEGLYNELQKDKMAEAYSEIGMKGERRRGKGHDGLYQGLSTATKDTYDALHMQALPPR

SEQ ID NO: 594 - protein, 280 aa, Artificial Sequence
  source: /note="Description of Artificial Sequence: Synthetic polypeptide"
MRWCLLLIWAQGLRQAPLASGMMTGTIETTGNISAEKGGSIILQCHLSSTTAQVTQVNWEQQDQLLAICNADLGWHISPSFKDRVAPGPGLGLTLQSLTVNDTGEYFCIYHTYPDGTYTGRIFLEVLESSVAEHGARFQIPFWVLVVVGGVLACYSLLVTVAFIIFWVRVKFSRSADAPAYQQGQNQLYNELNLGRREEYDVLDKRRGRDPEMGGKPRRKNPQEGLYNELQKDKMAEAYSEIGMKGERRRGKGHDGLYQGLSTATKDTYDALHMQALPPR

SEQ ID NO: 595 - protein, 259 aa, Artificial Sequence
  source: /note="Description of Artificial Sequence: Synthetic polypeptide"
MMTGTIETTGNISAEKGGSIILQCHLSSTTAQVTQVNWEQQDQLLAICNADLGWHISPSFKDRVAPGPGLGLTLQSLTVNDTGEYFCIYHTYPDGTYTGRIFLEVLESSVAEHGARFQIPFWVLVVVGGVLACYSLLVTVAFIIFWVRVKFSRSADAPAYQQGQNQLYNELNLGRREEYDVLDKRRGRDPEMGGKPRRKNPQEGLYNELQKDKMAEAYSEIGMKGERRRGKGHDGLYQGLSTATKDTYDALHMQALPPR

SEQ ID NO: 596 - protein, 735 aa, Artificial Sequence
  source: /note="Description of Artificial Sequence: Synthetic polypeptide"
MGRGLLRGLWPLHIVLWTRIASTIPPHVQKSVNNDMIVTDNNGAVKFPQLCKFCDVRFSTCDNQKSCMSNCSITSICEKPQEVCVAVWRKNDENITLETVCHDPKLPYHDFILEDAASPKCIMKEKKKPGETFFMCSCSSDECNDNIIFSEEYNTSNPDLLLVIFQFWVLVVVGGVLACYSLLVTVAFIIFWVRSKRSRLLHSALRNVPFRSEVLGWDPDSLADYFKKLNYKDCEKAVKKYHIDGARFLNLTENDIQKFPKLRVPILSKLSQEINKNEERRSIFTRKPQVPRFPEETESHEEDNGGWSSFEEDDYESPNDDQDGEDDGDYESPNEEEEAPVEDDADYEPPPSNDEEALQNSILPAKPFPNSNSMYIDRPPSGKTPQQPPVPPQRPMAALPPPPAGRNHSPLPPPQTNHEEPSRSRNHKTAKLPAPSIDRSTKPPLDRSLAPFDREPFTLGKKPPFSDKPSIPAGRSLGEHLPKIQKPPLPPTTERHERSSPLPGKKPPVPKHGWGPDRRENDEDDVHQRPLPQPALLPMSSNTFPSRSTKPSPMNPLPSSHMPGAFSESNSSFPQSASLPPYFSQGPSNRPPIRAEGRNFPLPLPNKPRPPSPAEEENSLNEEWYVSYITRPEAEAALRKINQDGTFLVRDSSKKTTTNPYVLMVLYKDKVYNIQIRYQKESQVYLLGTGLRGKEDFLSVSDIIDYFRKMPLLLIDGKNRGSRYQCTLTHAAGYP

SEQ ID NO: 597 - protein, 713 aa, Artificial Sequence
  source: /note="Description of Artificial Sequence: Synthetic polypeptide"
TIPPHVQKSVNNDMIVTDNNGAVKFPQLCKFCDVRFSTCDNQKSCMSNCSITSICEKPQEVCVAVWRKNDENITLETVCHDPKLPYHDFILEDAASPKCIMKEKKKPGETFFMCSCSSDECNDNIIFSEEYNTSNPDLLLVIFQFWVLVVVGGVLACYSLLVTVAFIIFWVRSKRSRLLHSALRNVPFRSEVLGWDPDSLADYFKKLNYKDCEKAVKKYHIDGARFLNLTENDIQKFPKLRVPILSKLSQEINKNEERRSIFTRKPQVPRFPEETESHEEDNGGWSSFEEDDYESPNDDQDGEDDGDYESPNEEEEAPVEDDADYEPPPSNDEEALQNSILPAKPFPNSNSMYIDRPPSGKTPQQPPVPPQRPMAALPPPPAGRNHSPLPPPQTNHEEPSRSRNHKTAKLPAPSIDRSTKPPLDRSLAPFDREPFTLGKKPPFSDKPSIPAGRSLGEHLPKIQKPPLPPTTERHERSSPLPGKKPPVPKHGWGPDRRENDEDDVHQRPLPQPALLPMSSNTFPSRSTKPSPMNPLPSSHMPGAFSESNSSFPQSASLPPYFSQGPSNRPPIRAEGRNFPLPLPNKPRPPSPAEEENSLNEEWYVSYITRPEAEAALRKINQDGTFLVRDSSKKTTTNPYVLMVLYKDKVYNIQIRYQKESQVYLLGTGLRGKEDFLSVSDIIDYFRKMPLLLIDGKNRGSRYQCTLTHAAGYP

SEQ ID NO: 598 - protein, 498 aa, Artificial Sequence
  source: /note="Description of Artificial Sequence: Synthetic polypeptide"
MGRGLLRGLWPLHIVLWTRIASTIPPHVQKSVNNDMIVTDNNGAVKFPQLCKFCDVRFSTCDNQKSCMSNCSITSICEKPQEVCVAVWRKNDENITLETVCHDPKLPYHDFILEDAASPKCIMKEKKKPGETFFMCSCSSDECNDNIIFSEEYNTSNPDLLLVIFQFWVLVVVGGVLACYSLLVTVAFIIFWVRSKRSRLLHSAAGGPGAGSAAPVSSTSSLPLAALNMRVRRRLSLFLNVRTQVAADWTALAEEMDFEYLEIRQLETQADPTGRLLDAWQGRPGASVGRLLELLTKLGRDDVLLELGPSIEEDCQKYILKQQQEEAEKPLQVAAVDSSVPRTAELAGITTLDDPLGHMPERFDAFICYCPSDIQFVQEMIRQLEQTNYRLKLCVSDRDVLPGTCVWSIASELIEKRCRRMVVVVSDDYLQSKECDFQTKFALSLSPGAHQKRLIPIKYKAMKKEFPSILRFITVCDYTNPCTKSWFWTRLAKALSLP

SEQ ID NO: 599 - protein, 476 aa, Artificial Sequence
  source: /note="Description of Artificial Sequence: Synthetic polypeptide"
TIPPHVQKSVNNDMIVTDNNGAVKFPQLCKFCDVRFSTCDNQKSCMSNCSITSICEKPQEVCVAVWRKNDENITLETVCHDPKLPYHDFILEDAASPKCIMKEKKKPGETFFMCSCSSDECNDNIIFSEEYNTSNPDLLLVIFQFWVLVVVGGVLACYSLLVTVAFIIFWVRSKRSRLLHSAAGGPGAGSAAPVSSTSSLPLAALNMRVRRRLSLFLNVRTQVAADWTALAEEMDFEYLEIRQLETQADPTGRLLDAWQGRPGASVGRLLELLTKLGRDDVLLELGPSIEEDCQKYILKQQQEEAEKPLQVAAVDSSVPRTAELAGITTLDDPLGHMPERFDAFICYCPSDIQFVQEMIRQLEQTNYRLKLCVSDRDVLPGTCVWSIASELIEKRCRRMVVVVSDDYLQSKECDFQTKFALSLSPGAHQKRLIPIKYKAMKKEFPSILRFITVCDYTNPCTKSWFWTRLAKALSLP

SEQ ID NO: 600 - protein, 239 aa, Artificial Sequence; identical to SEQ ID NO: 529
  source: /note="Description of Artificial Sequence: Synthetic polypeptide"

SEQ ID NO: 601 - protein, 217 aa, Artificial Sequence
  source: /note="Description of Artificial Sequence: Synthetic polypeptide"
TIPPHVQKSVNNDMIVTDNNGAVKFPQLCKFCDVRFSTCDNQKSCMSNCSITSICEKPQEVCVAVWRKNDENITLETVCHDPKLPYHDFILEDAASPKCIMKEKKKPGETFFMCSCSSDECNDNIIFSEEYNTSNPDLLLVIFQGVLAGIVMGDLVLTVLIALAVYFLGRLVPRGRGAAEAATRKQRITETESPYQELQGQRSDVYSDLNTQRPYYK

SEQ ID NO: 602 - protein, 618 aa, Artificial Sequence
  source: /note="Description of Artificial Sequence: Synthetic polypeptide"
MGRGLLRGLWPLHIVLWTRIASTIPPHVQKSVNNDMIVTDNNGAVKFPQLCKFCDVRFSTCDNQKSCMSNCSITSICEKPQEVCVAVWRKNDENITLETVCHDPKLPYHDFILEDAASPKCIMKEKKKPGETFFMCSCSSDECNDNIIFSEEYNTSNPDLLLVIFQFWVLVVVGGVLACYSLLVTVAFIIFWVRSKRSRLLHSASSSGSSPRPAPDENEFPFGCPPTVCQDPKEPRALCCAGCLSENPRNGEDQICPKCRGEDLQSISPGSRLRTQEKAHPEVAEAGIGCPFAGVGCSFKGSPQSVQEHEVTSQTSHLNLLLGFMKQWKARLGCGLESGPMALEQNLSDLQLQAAVEVAGDLEVDCYRAPCSESQEELALQHFMKEKLLAELEGKLRVFENIVAVLNKEVEASHLALATSIHQSQLDRERILSLEQRVVELQQTLAQKDQALGKLEQSLRLMEEASFDGTFLWKITNVTRRCHESACGRTVSLFSPAFYTAKYGYKLCLRLYLNGDGTGKRTHLSLFIVIMRGEYDALLPWPFRNKVTFMLLDQNNREHAIDAFRPDLSSASFQRPQSETNVASGCPLFFPLSKLQSPKHAYVKDDTMFLKCIVETST

SEQ ID NO: 603 - protein, 596 aa, Artificial Sequence
  source: /note="Description of Artificial Sequence: Synthetic polypeptide"
TIPPHVQKSVNNDMIVTDNNGAVKFPQLCKFCDVRFSTCDNQKSCMSNCSITSICEKPQEVCVAVWRKNDENITLETVCHDPKLPYHDFILEDAASPKCIMKEKKKPGETFFMCSCSSDECNDNIIFSEEYNTSNPDLLLVIFQFWVLVVVGGVLACYSLLVTVAFIIFWVRSKRSRLLHSASSSGSSPRPAPDENEFPFGCPPTVCQDPKEPRALCCAGCLSENPRNGEDQICPKCRGEDLQSISPGSRLRTQEKAHPEVAEAGIGCPFAGVGCSFKGSPQSVQEHEVTSQTSHLNLLLGFMKQWKARLGCGLESGPMALEQNLSDLQLQAAVEVAGDLEVDCYRAPCSESQEELALQHFMKEKLLAELEGKLRVFENIVAVLNKEVEASHLALATSIHQSQLDRERILSLEQRVVELQQTLAQKDQALGKLEQSLRLMEEASFDGTFLWKITNVTRRCHESACGRTVSLFSPAFYTAKYGYKLCLRLYLNGDGTGKRTHLSLFIVIMRGEYDALLPWPFRNKVTFMLLDQNNREHAIDAFRPDLSSASFQRPQSETNVASGCPLFFPLSKLQSPKHAYVKDDTMFLKCIVETST

SEQ ID NO: 604 - protein, 703 aa, Artificial Sequence
  source: /note="Description of Artificial Sequence: Synthetic polypeptide"
MGRGLLRGLWPLHIVLWTRIASTIPPHVQKSVNNDMIVTDNNGAVKFPQLCKFCDVRFSTCDNQKSCMSNCSITSICEKPQEVCVAVWRKNDENITLETVCHDPKLPYHDFILEDAASPKCIMKEKKKPGETFFMCSCSSDECNDNIIFSEEYNTSNPDLLLVIFQFWVLVVVGGVLACYSLLVTVAFIIFWVRSKRSRLLHSAAASVTPPGSLELLQPGFSKTLLGTKLEAKYLCSACRNVLRRPFQAQCGHRYCSFCLASILSSGPQNCAACVHEGIYEEGISILESSSAFPDNAARREVESLPAVCPSDGCTWKGTLKEYESCHEGRCPLMLTECPACKGLVRLGEKERHLEHECPERSLSCRHCRAPCCGADVKAHHEVCPKFPLTCDGCGKKKIPREKFQDHVKTCGKCRVPCRFHAIGCLETVEGEKQQEHEVQWLREHLAMLLSSVLEAKPLLGDQSHAGSELLQRCESLEKKTATFENIVCVLNREVERVAMTAEACSRQHRLDQDKIEALSSKVQQLERSIGLKDLAMADLEQKVLEMEASTYDGVFIWKISDFARKRQEAVAGRIPAIFSPAFYTSRYGYKMCLRIYLNGDGTGRGTHLSLFFVVMKGPNDALLRWPFNQKVTLMLLDQNNREHVIDAFRPDVTSSSFQRPVNDMNIASGCPLFCPVSKMEAKNSYVRDDAIFIKAIVDLTGL

SEQ ID NO: 605 - protein, 681 aa, Artificial Sequence
  source: /note="Description of Artificial Sequence: Synthetic polypeptide"
TIPPHVQKSVNNDMIVTDNNGAVKFPQLCKFCDVRFSTCDNQKSCMSNCSITSICEKPQEVCVAVWRKNDENITLETVCHDPKLPYHDFILEDAASPKCIMKEKKKPGETFFMCSCSSDECNDNIIFSEEYNTSNPDLLLVIFQFWVLVVVGGVLACYSLLVTVAFIIFWVRSKRSRLLHSAAASVTPPGSLELLQPGFSKTLLGTKLEAKYLCSACRNVLRRPFQAQCGHRYCSFCLASILSSGPQNCAACVHEGIYEEGISILESSSAFPDNAARREVESLPAVCPSDGCTWKGTLKEYESCHEGRCPLMLTECPACKGLVRLGEKERHLEHECPERSLSCRHCRAPCCGADVKAHHEVCPKFPLTCDGCGKKKIPREKFQDHVKTCGKCRVPCRFHAIGCLETVEGEKQQEHEVQWLREHLAMLLSSVLEAKPLLGDQSHAGSELLQRCESLEKKTATFENIVCVLNREVERVAMTAEACSRQHRLDQDKIEALSSKVQQLERSIGLKDLAMADLEQKVLEMEASTYDGVFIWKISDFARKRQEAVAGRIPAIFSPAFYTSRYGYKMCLRIYLNGDGTGRGTHLSLFFVVMKGPNDALLRWPFNQKVTLMLLDQNNREHVIDAFRPDVTSSSFQRPVNDMNIASGCPLFCPVSKMEAKNSYVRDDAIFIKAIVDLTGL

SEQ ID NO: 606 - protein, 770 aa, Artificial Sequence
  source: /note="Description of Artificial Sequence: Synthetic polypeptide"
MGRGLLRGLWPLHIVLWTRIASTIPPHVQKSVNNDMIVTDNNGAVKFPQLCKFCDVRFSTCDNQKSCMSNCSITSICEKPQEVCVAVWRKNDENITLETVCHDPKLPYHDFILEDAASPKCIMKEKKKPGETFFMCSCSSDECNDNIIFSEEYNTSNPDLLLVIFQFWVLVVVGGVLACYSLLVTVAFIIFWVRSKRSRLLHSESSKKMDSPGALQTNPPLKLHTDRSAGTPVFVPEQGGYKEKFVKTVEDKYKCEKCHLVLCSPKQTECGHRFCESCMAALLSSSSPKCTACQESIVKDKVFKDNCCKREILALQIYCRNESRGCAEQLMLGHLLVHLKNDCHFEELPCVRPDCKEKVLRKDLRDHVEKACKYREATCSHCKSQVPMIALQKHEDTDCPCVVVSCPHKCSVQTLLRSELSAHLSECVNAPSTCSFKRYGCVFQGTNQQIKAHEASSAVQHVNLLKEWSNSLEKKVSLLQNESVEKNKSIQSLHNQICSFEIEIERQKEMLRNNESKILHLQRVIDSQAEKLKELDKEIRPFRQNWEEADSMKSSVESLQNRVTELESVDKSAGQVARNTGLLESQLSRHDQMLSVHDIRLADMDLRFQVLETASYNGVLIWKIRDYKRRKQEAVMGKTLSLYSQPFYTGYFGYKMCARVYLNGDGMGKGTHLSLFFVIMRGEYDALLPWPFKQKVTLMLMDQGSSRRHLGDAFKPDPNSSSFKKPTGEMNIASGCPVFVAQTVLENGTYIKDDTIFIKVIVDTSDLPDP

SEQ ID NO: 607 - protein, 748 aa, Artificial Sequence
  source: /note="Description of Artificial Sequence: Synthetic polypeptide"
TIPPHVQKSVNNDMIVTDNNGAVKFPQLCKFCDVRFSTCDNQKSCMSNCSITSICEKPQEVCVAVWRKNDENITLETVCHDPKLPYHDFILEDAASPKCIMKEKKKPGETFFMCSCSSDECNDNIIFSEEYNTSNPDLLLVIFQFWVLVVVGGVLACYSLLVTVAFIIFWVRSKRSRLLHSESSKKMDSPGALQTNPPLKLHTDRSAGTPVFVPEQGGYKEKFVKTVEDKYKCEKCHLVLCSPKQTECGHRFCESCMAALLSSSSPKCTACQESIVKDKVFKDNCCKREILALQIYCRNESRGCAEQLMLGHLLVHLKNDCHFEELPCVRPDCKEKVLRKDLRDHVEKACKYREATCSHCKSQVPMIALQKHEDTDCPCVVVSCPHKCSVQTLLRSELSAHLSECVNAPSTCSFKRYGCVFQGTNQQIKAHEASSAVQHVNLLKEWSNSLEKKVSLLQNESVEKNKSIQSLHNQICSFEIEIERQKEMLRNNESKILHLQRVIDSQAEKLKELDKEIRPFRQNWEEADSMKSSVESLQNRVTELESVDKSAGQVARNTGLLESQLSRHDQMLSVHDIRLADMDLRFQVLETASYNGVLIWKIRDYKRRKQEAVMGKTLSLYSQPFYTGYFGYKMCARVYLNGDGMGKGTHLSLFFVIMRGEYDALLPWPFKQKVTLMLMDQGSSRRHLGDAFKPDPNSSSFKKPTGEMNIASGCPVFVAQTVLENGTYIKDDTIFIKVIVDTSDLPDP

SEQ ID NO: 608 - protein, 724 aa, Artificial Sequence
  source: /note="Description of Artificial Sequence: Synthetic polypeptide"
MGRGLLRGLWPLHIVLWTRIASTIPPHVQKSVNNDMIVTDNNGAVKFPQLCKFCDVRFSTCDNQKSCMSNCSITSICEKPQEVCVAVWRKNDENITLETVCHDPKLPYHDFILEDAASPKCIMKEKKKPGETFFMCSCSSDECNDNIIFSEEYNTSNPDLLLVIFQFWVLVVVGGVLACYSLLVTVAFIIFWVRSKRSRLLHSSLLNCENSCGSSQSESDCCVAMASSCSAVTKDDSVGGTASTGNLSSSFMEEIQGYDVEFDPPLESKYECPICLMALREAVQTPCGHRFCKACIIKSIRDAGHKCPVDNEILLENQLFPDNFAKREILSLMVKCPNEGCLHKMELRHLEDHQAHCEFALMDCPQCQRPFQKFHINIHILKDCPRRQVSCDNCAASMAFEDKEIHDQNCPLANVICEYCNTILIREQMPNHYDLDCPTAPIPCTFSTFGCHEKMQRNHLARHLQENTQSHMRMLAQAVHSLSVIPDSGYISEVRNFQETIHQLEGRLVRQDHQIRELTAKMETQSMYVSELKRTIRTLEDKVAEIEAQQCNGIYIWKIGNFGMHLKCQEEEKPVVIHSPGFYTGKPGYKLCMRLHLQLPTAQRCANYISLFVHTMQGEYDSHLPWPFQGTIRLTILDQSEAPVRQNHEEIMDAKPELLAFQRPTIPRNPKGFGYVTFMHLEALRQRTFIKDDTLLVRCEVSTRFDMGSLRREGFQPRSTDAGV

SEQ ID NO: 609 - protein, 702 aa, Artificial Sequence
  source: /note="Description of Artificial Sequence: Synthetic polypeptide"
TIPPHVQKSVNNDMIVTDNNGAVKFPQLCKFCDVRFSTCDNQKSCMSNCSITSICEKPQEVCVAVWRKNDENITLETVCHDPKLPYHDFILEDAASPKCIMKEKKKPGETFFMCSCSSDECNDNIIFSEEYNTSNPDLLLVIFQFWVLVVVGGVLACYSLLVTVAFIIFWVRSKRSRLLHSSLLNCENSCGSSQSESDCCVAMASSCSAVTKDDSVGGTASTGNLSSSFMEEIQGYDVEFDPPLESKYECPICLMALREAVQTPCGHRFCKACIIKSIRDAGHKCPVDNEILLENQLFPDNFAKREILSLMVKCPNEGCLHKMELRHLEDHQAHCEFALMDCPQCQRPFQKFHINIHILKDCPRRQVSCDNCAASMAFEDKEIHDQNCPLANVICEYCNTILIREQMPNHYDLDCPTAPIPCTFSTFGCHEKMQRNHLARHLQENTQSHMRMLAQAVHSLSVIPDSGYISEVRNFQETIHQLEGRLVRQDHQIRELTAKMETQSMYVSELKRTIRTLEDKVAEIEAQQCNGIYIWKIGNFGMHLKCQEEEKPVVIHSPGFYTGKPGYKLCMRLHLQLPTAQRCANYISLFVHTMQGEYDSHLPWPFQGTIRLTILDQSEAPVRQNHEEIMDAKPELLAFQRPTIPRNPKGFGYVTFMHLEALRQRTFIKDDTLLVRCEVSTRFDMGSLRREGFQPRSTDAGV

SEQ ID NO: 610 - protein, 423 aa, Artificial Sequence
  source: /note="Description of Artificial Sequence: Synthetic polypeptide"
MGRGLLRGLWPLHIVLWTRIASTIPPHVQKSVNNDMIVTDNNGAVKFPQLCKFCDVRFSTCDNQKSCMSNCSITSICEKPQEVCVAVWRKNDENITLETVCHDPKLPYHDFILEDAASPKCIMKEKKKPGETFFMCSCSSDECNDNIIFSEEYNTSNPDLLLVIFQFWVLVVVGGVLACYSLLVTVAFIIFWVRSKRSRLLHSASSTSLPAPGSRPKKPLGKMADWFRQTLLKKPKKRPNSPESTSSDASQPTSQDSPLPPSLSSVTSPSLPPTHASDSGSSRWSKDYDVCVCHSEEDLVAAQDLVSYLEGSTASLRCFLQLRDATPGGAIVSELCQALSSSHCRVLLITPGFLQDPWCKYQMLQALTEAPGAEGCTIPLLSGLSRAAYPPELRFMYYVDGRGPDGGFRQVKEAVMRYLQTLS

SEQ ID NO: 611 - protein, 401 aa, Artificial Sequence
  source: /note="Description of Artificial Sequence: Synthetic polypeptide"
TIPPHVQKSVNNDMIVTDNNGAVKFPQLCKFCDVRFSTCDNQKSCMSNCSITSICEKPQEVCVAVWRKNDENITLETVCHDPKLPYHDFILEDAASPKCIMKEKKKPGETFFMCSCSSDECNDNIIFSEEYNTSNPDLLLVIFQFWVLVVVGGVLACYSLLVTVAFIIFWVRSKRSRLLHSASSTSLPAPGSRPKKPLGKMADWFRQTLLKKPKKRPNSPESTSSDASQPTSQDSPLPPSLSSVTSPSLPPTHASDSGSSRWSKDYDVCVCHSEEDLVAAQDLVSYLEGSTASLRCFLQLRDATPGGAIVSELCQALSSSHCRVLLITPGFLQDPWCKYQMLQALTEAPGAEGCTIPLLSGLSRAAYPPELRFMYYVDGRGPDGGFRQVKEAVMRYLQTLS

SEQ ID NO: 612 - protein, 658 aa, Artificial Sequence
  source: /note="Description of Artificial Sequence: Synthetic polypeptide"
MGRGLLRGLWPLHIVLWTRIASTIPPHVQKSVNNDMIVTDNNGAVKFPQLCKFCDVRFSTCDNQKSCMSNCSITSICEKPQEVCVAVWRKNDENITLETVCHDPKLPYHDFILEDAASPKCIMKEKKKPGETFFMCSCSSDECNDNIIFSEEYNTSNPDLLLVIFQFWVLVVVGGVLACYSLLVTVAFIIFWVRSKRSRLLHSDKLNKITVPASQKLRQLQKMVHDIKNNEGGIMNKIKKLKVKAPPSVPRRDYASESPADEEEQWSDDFDSDYENPDEHSDSEMYVMPAEENADDSYEPPPVEQETRPVHPALPFARGEYIDNRSSQRHSPPFSKTLPSKPSWPSEKARLTSTLPALTALQKPQVPPKPKGLLEDEADYVVPVEDNDENYIHPTESSSPPPEKAPMVNRSTKPNSSTPASPPGTASGRNSGAWETKSPPPAAPSPLPRAGKKPTTPLKTTPVASQQNASSVCEEKPIPAERHRGSSHRQEAVQSPVFPPAQKQIHQKPIPLPRFTEGGNPTVDGPLPSFSSNSTISEQEAGVLCKPWYAGACDRKSAEEALHRSNKDGSFLIRKSSGHDSKQPYTLVVFFNKRVYNIPVRFIEATKQYALGRKKNGEEYFGSVAEIIRNHQHSPLVLIDSQNNTKDSTRLKYAVKVS

SEQ ID NO: 613 - protein, 636 aa, Artificial Sequence
  source: /note="Description of Artificial Sequence: Synthetic polypeptide"
TIPPHVQKSVNNDMIVTDNNGAVKFPQLCKFCDVRFSTCDNQKSCMSNCSITSICEKPQEVCVAVWRKNDENITLETVCHDPKLPYHDFILEDAASPKCIMKEKKKPGETFFMCSCSSDECNDNIIFSEEYNTSNPDLLLVIFQFWVLVVVGGVLACYSLLVTVAFIIFWVRSKRSRLLHSDKLNKITVPASQKLRQLQKMVHDIKNNEGGIMNKIKKLKVKAPPSVPRRDYASESPADEEEQWSDDFDSDYENPDEHSDSEMYVMPAEENADDSYEPPPVEQETRPVHPALPFARGEYIDNRSSQRHSPPFSKTLPSKPSWPSEKARLTSTLPALTALQKPQVPPKPKGLLEDEADYVVPVEDNDENYIHPTESSSPPPEKAPMVNRSTKPNSSTPASPPGTASGRNSGAWETKSPPPAAPSPLPRAGKKPTTPLKTTPVASQQNASSVCEEKPIPAERHRGSSHRQEAVQSPVFPPAQKQIHQKPIPLPRFTEGGNPTVDGPLPSFSSNSTISEQEAGVLCKPWYAGACDRKSAEEALHRSNKDGSFLIRKSSGHDSKQPYTLVVFFNKRVYNIPVRFIEATKQYALGRKKNGEEYFGSVAEIIRNHQHSPLVLIDSQNNTKDSTRLKYAVKVS

SEQ ID NO: 614 - protein, 419 aa, Artificial Sequence
  source: /note="Description of Artificial Sequence: Synthetic polypeptide"
MGRGLLRGLWPLHIVLWTRIASTIPPHVQKSVNNDMIVTDNNGAVKFPQLCKFCDVRFSTCDNQKSCMSNCSITSICEKPQEVCVAVWRKNDENITLETVCHDPKLPYHDFILEDAASPKCIMKEKKKPGETFFMCSCSSDECNDNIIFSEEYNTSNPDLLLVIFQFWVLVVVGGVLACYSLLVTVAFIIFWVRSKRSRLLHSEAIAKYDFKATADDELSFKRGDILKVLNEECDQNWYKAELNGKDGFIPKNYIEMKPHPWFFGKIPRAKAEEMLSKQRHDGAFLIRESESAPGDFSLSVKFGNDVQHFKVLRDGAGKYFLWVVKFNSLNELVDYHRSTSVSRNQQIFLRDIEQVPQQPTYVQALFDFDPQEDGELGFRRGDFIHVMDNSDPNWWKGACHGQTGMFPRNYVTPVNRNV

SEQ ID NO: 615 - protein, 397 aa, Artificial Sequence
  source: /note="Description of Artificial Sequence: Synthetic polypeptide"
TIPPHVQKSVNNDMIVTDNNGAVKFPQLCKFCDVRFSTCDNQKSCMSNCSITSICEKPQEVCVAVWRKNDENITLETVCHDPKLPYHDFILEDAASPKCIMKEKKKPGETFFMCSCSSDECNDNIIFSEEYNTSNPDLLLVIFQFWVLVVVGGVLACYSLLVTVAFIIFWVRSKRSRLLHSEAIAKYDFKATADDELSFKRGDILKVLNEECDQNWYKAELNGKDGFIPKNYIEMKPHPWFFGKIPRAKAEEMLSKQRHDGAFLIRESESAPGDFSLSVKFGNDVQHFKVLRDGAGKYFLWVVKFNSLNELVDYHRSTSVSRNQQIFLRDIEQVPQQPTYVQALFDFDPQEDGELGFRRGDFIHVMDNSDPNWWKGACHGQTGMFPRNYVTPVNRNV

SEQ ID NO: 616 - protein, 266 aa, Artificial Sequence
  source: /note="Description of Artificial Sequence: Synthetic polypeptide"
MGRGLLRGLWPLHIVLWTRIASTIPPHVQKSVNNDMIVTDNNGAVKFPQLCKFCDVRFSTCDNQKSCMSNCSITSICEKPQEVCVAVWRKNDENITLETVCHDPKLPYHDFILEDAASPKCIMKEKKKPGETFFMCSCSSDECNDNIIFSEEYNTSNPDLLLVIFQIIVAVVIATAVAAIVAAVVALIYCRKKRISANSTDPVKAAQFEPPGRQMIAIRKRQLEETNNDYETADGGYMTLNPRAPTDDDKNIYLTLPPNDHVNSNN

SEQ ID NO: 617 - protein, 244 aa, Artificial Sequence
  source: /note="Description of Artificial Sequence: Synthetic polypeptide"
TIPPHVQKSVNNDMIVTDNNGAVKFPQLCKFCDVRFSTCDNQKSCMSNCSITSICEKPQEVCVAVWRKNDENITLETVCHDPKLPYHDFILEDAASPKCIMKEKKKPGETFFMCSCSSDECNDNIIFSEEYNTSNPDLLLVIFQIIVAVVIATAVAAIVAAVVALIYCRKKRISANSTDPVKAAQFEPPGRQMIAIRKRQLEETNNDYETADGGYMTLNPRAPTDDDKNIYLTLPPNDHVNSNN

SEQ ID NO: 618 - protein, 212 aa, Artificial Sequence
  source: /note="Description of Artificial Sequence: Synthetic polypeptide"
MGRGLLRGLWPLHIVLWTRIASTIPPHVQKSVNNDMIVTDNNGAVKFPQLCKFCDVRFSTCDNQKSCMSNCSITSICEKPQEVCVAVWRKNDENITLETVCHDPKLPYHDFILEDAASPKCIMKEKKKPGETFFMCSCSSDECNDNIIFSEEYNTSNPDLLLVIFQVSFCLVMVLLFAVDTGLYFSVKTNIRSSTRDWKDHKFKWRKDPQDK

SEQ ID NO: 619 - protein, 190 aa, Artificial Sequence
  source: /note="Description of Artificial Sequence: Synthetic polypeptide"
TIPPHVQKSVNNDMIVTDNNGAVKFPQLCKFCDVRFSTCDNQKSCMSNCSITSICEKPQEVCVAVWRKNDENITLETVCHDPKLPYHDFILEDAASPKCIMKEKKKPGETFFMCSCSSDECNDNIIFSEEYNTSNPDLLLVIFQVSFCLVMVLLFAVDTGLYFSVKTNIRSSTRDWKDHKFKWRKDPQDK

SEQ ID NO: 620 - protein, 307 aa, Artificial Sequence
  source: /note="Description of Artificial Sequence: Synthetic polypeptide"
MGRGLLRGLWPLHIVLWTRIASTIPPHVQKSVNNDMIVTDNNGAVKFPQLCKFCDVRFSTCDNQKSCMSNCSITSICEKPQEVCVAVWRKNDENITLETVCHDPKLPYHDFILEDAASPKCIMKEKKKPGETFFMCSCSSDECNDNIIFSEEYNTSNPDLLLVIFQFLVIIVILSALFLGTLACFCVWRRKRKEKQSETSPKEFLTIYEDVKDLKTRRNHEQEQTFPGGGSTIYSMIQSQSSAPTSQEPAYTLYSLIQPSRKSGSRKRNHSPSFNSTIYEVIGKSQPKAQNPARLSRKELENFDVYS

SEQ ID NO: 621 - protein, 285 aa, Artificial Sequence
  source: /note="Description of Artificial Sequence: Synthetic polypeptide"
TIPPHVQKSVNNDMIVTDNNGAVKFPQLCKFCDVRFSTCDNQKSCMSNCSITSICEKPQEVCVAVWRKNDENITLETVCHDPKLPYHDFILEDAASPKCIMKEKKKPGETFFMCSCSSDECNDNIIFSEEYNTSNPDLLLVIFQFLVIIVILSALFLGTLACFCVWRRKRKEKQSETSPKEFLTIYEDVKDLKTRRNHEQEQTFPGGGSTIYSMIQSQSSAPTSQEPAYTLYSLIQPSRKSGSRKRNHSPSFNSTIYEVIGKSQPKAQNPARLSRKELENFDVYS

SEQ ID NO: 622 - protein, 264 aa, Artificial Sequence
  source: /note="Description of Artificial Sequence: Synthetic polypeptide"
MGRGLLRGLWPLHIVLWTRIASTIPPHVQKSVNNDMIVTDNNGAVKFPQLCKFCDVRFSTCDNQKSCMSNCSITSICEKPQEVCVAVWRKNDENITLETVCHDPKLPYHDFILEDAASPKCIMKEKKKPGETFFMCSCSSDECNDNIIFSEEYNTSNPDLLLVIFQWAVYAGLLGGVIMILIMVVILQLRRRGKTNHYQTTVEKKSLTIYAQVQKPGPLQKKLDSFPAQDPCTTIYVAATEPVPESVQETNSITVYASVTLPES

SEQ ID NO: 623 - protein, 242 aa, Artificial Sequence
  source: /note="Description of Artificial Sequence: Synthetic polypeptide"
TIPPHVQKSVNNDMIVTDNNGAVKFPQLCKFCDVRFSTCDNQKSCMSNCSITSICEKPQEVCVAVWRKNDENITLETVCHDPKLPYHDFILEDAASPKCIMKEKKKPGETFFMCSCSSDECNDNIIFSEEYNTSNPDLLLVIFQWAVYAGLLGGVIMILIMVVILQLRRRGKTNHYQTTVEKKSLTIYAQVQKPGPLQKKLDSFPAQDPCTTIYVAATEPVPESVQETNSITVYASVTLPES

SEQ ID NO: 624 - protein, 286 aa, Artificial Sequence
  source: /note="Description of Artificial Sequence: Synthetic polypeptide"
MGRGLLRGLWPLHIVLWTRIASTIPPHVQKSVNNDMIVTDNNGAVKFPQLCKFCDVRFSTCDNQKSCMSNCSITSICEKPQEVCVAVWRKNDENITLETVCHDPKLPYHDFILEDAASPKCIMKEKKKPGETFFMCSCSSDECNDNIIFSEEYNTSNPDLLLVIFQLLSVLAMFFLLVLILSSVFLFRLFKRRQGRIFPEGSCLNTFTKNPYAASKKTIYTYIMASRNTQPAESRIYDEILQSKVLPSKEEPVNTVYSEVQFADKMGKASTQDSKPPGTSSYEIVI

SEQ ID NO: 625 - protein, 264 aa, Artificial Sequence
  source: /note="Description of Artificial Sequence: Synthetic polypeptide"
TIPPHVQKSVNNDMIVTDNNGAVKFPQLCKFCDVRFSTCDNQKSCMSNCSITSICEKPQEVCVAVWRKNDENITLETVCHDPKLPYHDFILEDAASPKCIMKEKKKPGETFFMCSCSSDECNDNIIFSEEYNTSNPDLLLVIFQLLSVLAMFFLLVLILSSVFLFRLFKRRQGRIFPEGSCLNTFTKNPYAASKKTIYTYIMASRNTQPAESRIYDEILQSKVLPSKEEPVNTVYSEVQFADKMGKASTQDSKPPGTSSYEIVI

SEQ ID NO: 626 - protein, 271 aa, Artificial Sequence
  source: /note="Description of Artificial Sequence: Synthetic polypeptide"
MGRGLLRGLWPLHIVLWTRIASTIPPHVQKSVNNDMIVTDNNGAVKFPQLCKFCDVRFSTCDNQKSCMSNCSITSICEKPQEVCVAVWRKNDENITLETVCHDPKLPYHDFILEDAASPKCIMKEKKKPGETFFMCSCSSDECNDNIIFSEEYNTSNPDLLLVIFQILFMVSGICIVFGFIILLLLVLRKRRDSLSLSTQRTQGPAESARNLEYVSVSPTNNTVYASVTHSNRETEIWTPRENDTITIYSTINHSKESKPTFSRATALDNV

SEQ ID NO: 627 - protein, 249 aa, Artificial Sequence
  source: /note="Description of Artificial Sequence: Synthetic polypeptide"
TIPPHVQKSVNNDMIVTDNNGAVKFPQLCKFCDVRFSTCDNQKSCMSNCSITSICEKPQEVCVAVWRKNDENITLETVCHDPKLPYHDFILEDAASPKCIMKEKKKPGETFFMCSCSSDECNDNIIFSEEYNTSNPDLLLVIFQILFMVSGICIVFGFIILLLLVLRKRRDSLSLSTQRTQGPAESARNLEYVSVSPTNNTVYASVTHSNRETEIWTPRENDTITIYSTINHSKESKPTFSRATALDNV

SEQ ID NO: 628 - protein, 275 aa, Artificial Sequence
  source: /note="Description of Artificial Sequence: Synthetic polypeptide"
MGRGLLRGLWPLHIVLWTRIASTIPPHVQKSVNNDMIVTDNNGAVKFPQLCKFCDVRFSTCDNQKSCMSNCSITSICEKPQEVCVAVWRKNDENITLETVCHDPKLPYHDFILEDAASPKCIMKEKKKPGETFFMCSCSSDECNDNIIFSEEYNTSNPDLLLVIFQVLLCLLLVPLLLSLFVLGLFLWFLKRERQEEYIEEKKRVDICRETPNICPHSGENTEYDTIPHTNRTILKEDPANTVYSTVEIPKKMENPHSLLTMPDTPRLFAYENVI

SEQ ID NO: 629 - protein, 253 aa, Artificial Sequence
  source: /note="Description of Artificial Sequence: Synthetic polypeptide"
TIPPHVQKSVNNDMIVTDNNGAVKFPQLCKFCDVRFSTCDNQKSCMSNCSITSICEKPQEVCVAVWRKNDENITLETVCHDPKLPYHDFILEDAASPKCIMKEKKKPGETFFMCSCSSDECNDNIIFSEEYNTSNPDLLLVIFQVLLCLLLVPLLLSLFVLGLFLWFLKRERQEEYIEEKKRVDICRETPNICPHSGENTEYDTIPHTNRTILKEDPANTVYSTVEIPKKMENPHSLLTMPDTPRLFAYENVI

SEQ ID NO: 630 - protein, 308 aa, Artificial Sequence
  source: /note="Description of Artificial Sequence: Synthetic polypeptide"
MGRGLLRGLWPLHIVLWTRIASTIPPHVQKSVNNDMIVTDNNGAVKFPQLCKFCDVRFSTCDNQKSCMSNCSITSICEKPQEVCVAVWRKNDENITLETVCHDPKLPYHDFILEDAASPKCIMKEKKKPGETFFMCSCSSDECNDNIIFSEEYNTSNPDLLLVIFQIYLIIGICGGGSLLMVFVALLVFYITKRKKQRSRRNDEELETRAHRVATEERGRKPHQIPASTPQNPATSQHPPPPPGHRSQAPSHRPPPPGHRVQHQPQKRPPAPSGTQVHQQKGPPLPRPRVQPKPPHGAAENSLSPSSN

SEQ ID NO: 631 - protein, 286 aa, Artificial Sequence
  source: /note="Description of Artificial Sequence: Synthetic polypeptide"
TIPPHVQKSVNNDMIVTDNNGAVKFPQLCKFCDVRFSTCDNQKSCMSNCSITSICEKPQEVCVAVWRKNDENITLETVCHDPKLPYHDFILEDAASPKCIMKEKKKPGETFFMCSCSSDECNDNIIFSEEYNTSNPDLLLVIFQIYLIIGICGGGSLLMVFVALLVFYITKRKKQRSRRNDEELETRAHRVATEERGRKPHQIPASTPQNPATSQHPPPPPGHRSQAPSHRPPPPGHRVQHQPQKRPPAPSGTQVHQQKGPPLPRPRVQPKPPHGAAENSLSPSSN

SEQ ID NO: 632 - protein, 367 aa, Artificial Sequence
  source: /note="Description of Artificial Sequence: Synthetic polypeptide"
MGRGLLRGLWPLHIVLWTRIASTIPPHVQKSVNNDMIVTDNNGAVKFPQLCKFCDVRFSTCDNQKSCMSNCSITSICEKPQEVCVAVWRKNDENITLETVCHDPKLPYHDFILEDAASPKCIMKEKKKPGETFFMCSCSSDECNDNIIFSEEYNTSNPDLLLVIFQLWIGLFLMVCLLCVGIFSWCIWKRKGRCSVPAFCSSQAEAPADTPEPTAGHTLYSVLSQGYEKLDTPLRPARQQPTPTSDSSSDSNLTTEEDEDRPEVHKPISGRYEVFDQVTQEGAGHDPAPEGQADYDPVTPYVTEVESVVGENTMYAQVFNLQGKTPVSQKEESSATIYCSIRKPQVVPPPQQNDLEIPESPTYENFT

SEQ ID NO: 633 - protein, 345 aa, Artificial Sequence
  source: /note="Description of Artificial Sequence: Synthetic polypeptide"
TIPPHVQKSVNNDMIVTDNNGAVKFPQLCKFCDVRFSTCDNQKSCMSNCSITSICEKPQEVCVAVWRKNDENITLETVCHDPKLPYHDFILEDAASPKCIMKEKKKPGETFFMCSCSSDECNDNIIFSEEYNTSNPDLLLVIFQLWIGLFLMVCLLCVGIFSWCIWKRKGRCSVPAFCSSQAEAPADTPEPTAGHTLYSVLSQGYEKLDTPLRPARQQPTPTSDSSSDSNLTTEEDEDRPEVHKPISGRYEVFDQVTQEGAGHDPAPEGQADYDPVTPYVTEVESVVGENTMYAQVFNLQGKTPVSQKEESSATIYCSIRKPQVVPPPQQNDLEIPESPTYENFT

SEQ ID NO: 634 - protein, 424 aa, Artificial Sequence
  source: /note="Description of Artificial Sequence: Synthetic polypeptide"
MGRGLLRGLWPLHIVLWTRIASTIPPHVQKSVNNDMIVTDNNGAVKFPQLCKFCDVRFSTCDNQKSCMSNCSITSICEKPQEVCVAVWRKNDENITLETVCHDPKLPYHDFILEDAASPKCIMKEKKKPGETFFMCSCSSDECNDNIIFSEEYNTSNPDLLLVIFQLILTLSLILVVILVLLTVLALLSHRRALKQKIWPGIPSPESEFEGLFTTHKGNFQLWLYQNDGCLWWSPCTPFTEDPPASLEVLSERCWGTMQAVEPGTDDEGPLLEPVGSEHAQDTYLVLDKWLLPRNPPSEDLPGPGGSVDIVAMDEGSEASSCSSALASKPSPEGASAASFEYTILDPSSQLLRPWTLCPELPPTPPHLKYLYLVVSDSGISTDYSSGDSQGAQGGLSDGPYSNPYENSLIPAAEPLPPSYVACS

SEQ ID NO: 635 - protein, 402 aa, Artificial Sequence
  source: /note="Description of Artificial Sequence: Synthetic polypeptide"
TIPPHVQKSVNNDMIVTDNNGAVKFPQLCKFCDVRFSTCDNQKSCMSNCSITSICEKPQEVCVAVWRKNDENITLETVCHDPKLPYHDFILEDAASPKCIMKEKKKPGETFFMCSCSSDECNDNIIFSEEYNTSNPDLLLVIFQLILTLSLILVVILVLLTVLALLSHRRALKQKIWPGIPSPESEFEGLFTTHKGNFQLWLYQNDGCLWWSPCTPFTEDPPASLEVLSERCWGTMQAVEPGTDDEGPLLEPVGSEHAQDTYLVLDKWLLPRNPPSEDLPGPGGSVDIVAMDEGSEASSCSSALASKPSPEGASAASFEYTILDPSSQLLRPWTLCPELPPTPPHLKYLYLVVSDSGISTDYSSGDSQGAQGGLSDGPYSNPYENSLIPAAEPLPPSYVACS

SEQ ID NO: 636 - protein, 375 aa, Artificial Sequence
  source: /note="Description of Artificial Sequence: Synthetic polypeptide"
MGRGLLRGLWPLHIVLWTRIASTIPPHVQKSVNNDMIVTDNNGAVKFPQLCKFCDVRFSTCDNQKSCMSNCSITSICEKPQEVCVAVWRKNDENITLETVCHDPKLPYHDFILEDAASPKCIMKEKKKPGETFFMCSCSSDECNDNIIFSEEYNTSNPDLLLVIFQIILGLFGLLLLLTCLCGTAWLCCSPNRKNPLWPSVPDPAHSSLGSWVPTIMEEDAFQLPGLGTPPITKLTVLEEDEKKPVPWESHNSSETCGLPTLVQTYVLQGDPRAVSTQPQSQSGTSDQVLYGQLLGSPTSPGPGHYLRCDSTQPLLAGLTPSPKSYENLWFQASPLGTLVTPAPSQEDDCVFGPLLNFPLLQGIRVHGMEALGSF

SEQ ID NO: 637 - protein, 353 aa, Artificial Sequence
  source: /note="Description of Artificial Sequence: Synthetic polypeptide"
TIPPHVQKSVNNDMIVTDNNGAVKFPQLCKFCDVRFSTCDNQKSCMSNCSITSICEKPQEVCVAVWRKNDENITLETVCHDPKLPYHDFILEDAASPKCIMKEKKKPGETFFMCSCSSDECNDNIIFSEEYNTSNPDLLLVIFQIILGLFGLLLLLTCLCGTAWLCCSPNRKNPLWPSVPDPAHSSLGSWVPTIMEEDAFQLPGLGTPPITKLTVLEEDEKKPVPWESHNSSETCGLPTLVQTYVLQGDPRAVSTQPQSQSGTSDQVLYGQLLGSPTSPGPGHYLRCDSTQPLLAGLTPSPKSYENLWFQASPLGTLVTPAPSQEDDCVFGPLLNFPLLQGIRVHGMEALGSF

SEQ ID NO: 638 - protein, 621 aa, Artificial Sequence
  source: /note="Description of Artificial Sequence: Synthetic polypeptide"
MGRGLLRGLWPLHIVLWTRIASTIPPHVQKSVNNDMIVTDNNGAVKFPQLCKFCDVRFSTCDNQKSCMSNCSITSICEKPQEVCVAVWRKNDENITLETVCHDPKLPYHDFILEDAASPKCIMKEKKKPGETFFMCSCSSDECNDNIIFSEEYNTSNPDLLLVIFQVVVACMSIMALLLLLLLLLLYKYKQKPKYQVRWKIIESYEGNSYTFIDPTQLPYNEKWEFPRNNLQFGKTLGAGAFGKVVEATAFGLGKEDAVLKVAVKMLKSTAHADEKEALMSELKIMSHLGQHENIVNLLGACTHGGPVLVITEYCCYGDLLNFLRRKAEAMLGPSLSPGQDPEGGVDYKNIHLEKKYVRRDSGFSSQGVDTYVEMRPVSTSSNDSFSEQDLDKEDGRPLELRDLLHFSSQVAQGMAFLASKNCIHRDVAARNVLLTNGHVAKIGDFGLARDIMNDSNYIVKGNARLPVKWMAPESIFDCVYTVQSDVWSYGILLWEIFSLGLNPYPGILVNSKFYKLVKDGYQMAQPAFAPKNIYSIMQACWALEPTHRPTFQQICSFLQEQAQEDRRERDYTNLPSSSRSGGSGSSSSELEEESSSEHLTCCEQGDIAQPLLQPNNYQFC

SEQ ID NO: 639 - protein, 599 aa, Artificial Sequence
  source: /note="Description of Artificial Sequence: Synthetic polypeptide"
TIPPHVQKSVNNDMIVTDNNGAVKFPQLCKFCDVRFSTCDNQKSCMSNCSITSICEKPQEVCVAVWRKNDENITLETVCHDPKLPYHDFILEDAASPKCIMKEKKKPGETFFMCSCSSDECNDNIIFSEEYNTSNPDLLLVIFQVVVACMSIMALLLLLLLLLLYKYKQKPKYQVRWKIIESYEGNSYTFIDPTQLPYNEKWEFPRNNLQFGKTLGAGAFGKVVEATAFGLGKEDAVLKVAVKMLKSTAHADEKEALMSELKIMSHLGQHENIVNLLGACTHGGPVLVITEYCCYGDLLNFLRRKAEAMLGPSLSPGQDPEGGVDYKNIHLEKKYVRRDSGFSSQGVDTYVEMRPVSTSSNDSFSEQDLDKEDGRPLELRDLLHFSSQVAQGMAFLASKNCIHRDVAARNVLLTNGHVAKIGDFGLARDIMNDSNYIVKGNARLPVKWMAPESIFDCVYTVQSDVWSYGILLWEIFSLGLNPYPGILVNSKFYKLVKDGYQMAQPAFAPKNIYSIMQACWALEPTHRPTFQQICSFLQEQAQEDRRERDYTNLPSSSRSGGSGSSSSELEEESSSEHLTCCEQGDIAQPLLQPNNYQFC

SEQ ID NO: 640 - protein, 612 aa, Artificial Sequence
  source: /note="Description of Artificial Sequence: Synthetic polypeptide"
MGRGLLRGLWPLHIVLWTRIASTIPPHVQKSVNNDMIVTDNNGAVKFPQLCKFCDVRFSTCDNQKSCMSNCSITSICEKPQEVCVAVWRKNDENITLETVCHDPKLPYHDFILEDAASPKCIMKEKKKPGETFFMCSCSSDECNDNIIFSEEYNTSNPDLLLVIFQIIIYCTGAFLISCMVGSVIVYKMKSGTKKSDFHSQMAVHKLAKSIPLRRQVTVSADSSASMNSGVLLVRPSRLSSSGTPMLAGVSEYELPEDPRWELPRDRLVLGKPLGEGCFGQVVLAEAIGLDKDKPNRVTKVAVKMLKSDATEKDLSDLISEMEMMKMIGKHKNIINLLGACTQDGPLYVIVEYASKGNLREYLQARRPPGLEYCYNPSHNPEEQLSSKDLVSCAYQVARGMEYLASKKCIHRDLAARNVLVTEDNVMKIADFGLARDIHHIDYYKKTTNGRLPVKWMAPEALFDRIYTHQSDVWSFGVLLWEIFTLGGSPYPGVPVEELFKLLKEGHRMDKPSNCTNELYMMMRDCWHAVPSQRPTFKQLVEDLDRIVALTSNQEYLDLSMPLDQYSPSFPDTRSSTCSSGEDSVFSHEPLPEEPCLPRHPAQLANGGLKRR

SEQ ID NO: 641 - protein, 590 aa, Artificial Sequence
  source: /note="Description of Artificial Sequence: Synthetic polypeptide"
TIPPHVQKSVNNDMIVTDNNGAVKFPQLCKFCDVRFSTCDNQKSCMSNCSITSICEKPQEVCVAVWRKNDENITLETVCHDPKLPYHDFILEDAASPKCIMKEKKKPGETFFMCSCSSDECNDNIIFSEEYNTSNPDLLLVIFQIIIYCTGAFLISCMVGSVIVYKMKSGTKKSDFHSQMAVHKLAKSIPLRRQVTVSADSSASMNSGVLLVRPSRLSSSGTPMLAGVSEYELPEDPRWELPRDRLVLGKPLGEGCFGQVVLAEAIGLDKDKPNRVTKVAVKMLKSDATEKDLSDLISEMEMMKMIGKHKNIINLLGACTQDGPLYVIVEYASKGNLREYLQARRPPGLEYCYNPSHNPEEQLSSKDLVSCAYQVARGMEYLASKKCIHRDLAARNVLVTEDNVMKIADFGLARDIHHIDYYKKTTNGRLPVKWMAPEALFDRIYTHQSDVWSFGVLLWEIFTLGGSPYPGVPVEELFKLLKEGHRMDKPSNCTNELYMMMRDCWHAVPSQRPTFKQLVEDLDRIVALTSNQEYLDLSMPLDQYSPSFPDTRSSTCSSGEDSVFSHEPLPEEPCLPRHPAQLANGGLKRR

SEQ ID NO: 642 - protein, 248 aa, Artificial Sequence
  source: /note="Description of Artificial Sequence: Synthetic polypeptide"
MGRGLLRGLWPLHIVLWTRIASTIPPHVQKSVNNDMIVTDNNGAVKFPQLCKFCDVRFSTCDNQKSCMSNCSITSICEKPQEVCVAVWRKNDENITLETVCHDPKLPYHDFILEDAASPKCIMKEKKKPGETFFMCSCSSDECNDNIIFSEEYNTSNPDLLLVIFQGGTVLLLLFVISITTIIVIFLNRRRRRERRDLFTESWDTQKAPNNYRSPISTSQPTNQSMDDTREDIYVNYPTFSRRPKTRV

SEQ ID NO: 643 - protein, 226 aa, Artificial Sequence
  source: /note="Description of Artificial Sequence: Synthetic polypeptide"
TIPPHVQKSVNNDMIVTDNNGAVKFPQLCKFCDVRFSTCDNQKSCMSNCSITSICEKPQEVCVAVWRKNDENITLETVCHDPKLPYHDFILEDAASPKCIMKEKKKPGETFFMCSCSSDECNDNIIFSEEYNTSNPDLLLVIFQGGTVLLLLFVISITTIIVIFLNRRRRRERRDLFTESWDTQKAPNNYRSPISTSQPTNQSMDDTREDIYVNYPTFSRRPKTRV

SEQ ID NO: 644 - protein, 225 aa, Artificial Sequence
  source: /note="Description of Artificial Sequence: Synthetic polypeptide"
MGRGLLRGLWPLHIVLWTRIASTIPPHVQKSVNNDMIVTDNNGAVKFPQLCKFCDVRFSTCDNQKSCMSNCSITSICEKPQEVCVAVWRKNDENITLETVCHDPKLPYHDFILEDAASPKCIMKEKKKPGETFFMCSCSSDECNDNIIFSEEYNTSNPDLLLVIFQFWLPIGCAAFVVVCILGCILICWLTKKKYSSSVHDPNGEYMFMRAVNTAKKSRLTDVTL

SEQ ID NO: 645 - protein, 203 aa, Artificial Sequence
  source: /note="Description of Artificial Sequence: Synthetic polypeptide"
TIPPHVQKSVNNDMIVTDNNGAVKFPQLCKFCDVRFSTCDNQKSCMSNCSITSICEKPQEVCVAVWRKNDENITLETVCHDPKLPYHDFILEDAASPKCIMKEKKKPGETFFMCSCSSDECNDNIIFSEEYNTSNPDLLLVIFQFWLPIGCAAFVVVCILGCILICWLTKKKYSSSVHDPNGEYMFMRAVNTAKKSRLTDVTL

SEQ ID NO: 646 - protein, 212 aa, Artificial Sequence
  source: /note="Description of Artificial Sequence: Synthetic polypeptide"
MGRGLLRGLWPLHIVLWTRIASTIPPHVQKSVNNDMIVTDNNGAVKFPQLCKFCDVRFSTCDNQKSCMSNCSITSICEKPQEVCVAVWRKNDENITLETVCHDPKLPYHDFILEDAASPKCIMKEKKKPGETFFMCSCSSDECNDNIIFSEEYNTSNPDLLLVIFQMGLAFLVLVALVWFLVEDWLSRKRTRERASRASTWEGRRRLNTQTL

SEQ ID NO: 647 - protein, 190 aa, Artificial Sequence
  source: /note="Description of Artificial Sequence: Synthetic polypeptide"
TIPPHVQKSVNNDMIVTDNNGAVKFPQLCKFCDVRFSTCDNQKSCMSNCSITSICEKPQEVCVAVWRKNDENITLETVCHDPKLPYHDFILEDAASPKCIMKEKKKPGETFFMCSCSSDECNDNIIFSEEYNTSNPDLLLVIFQMGLAFLVLVALVWFLVEDWLSRKRTRERASRASTWEGRRRLNTQTL

SEQ ID NO: 648 - protein, 250 aa, Artificial Sequence
  source: /note="Description of Artificial Sequence: Synthetic polypeptide"
MGRGLLRGLWPLHIVLWTRIASTIPPHVQKSVNNDMIVTDNNGAVKFPQLCKFCDVRFSTCDNQKSCMSNCSITSICEKPQEVCVAVWRKNDENITLETVCHDPKLPYHDFILEDAASPKCIMKEKKKPGETFFMCSCSSDECNDNIIFSEEYNTSNPDLLLVIFQLVPVFCGLLVAKSLVLSALLVWWGDIWWKTMMELRSLDTQKATCHLQQVTDLPWTSVSSPVEREILYHTVARTKISDDDDEHTL

SEQ ID NO: 649 - protein, 228 aa, Artificial Sequence
  source: /note="Description of Artificial Sequence: Synthetic polypeptide"
TIPPHVQKSVNNDMIVTDNNGAVKFPQLCKFCDVRFSTCDNQKSCMSNCSITSICEKPQEVCVAVWRKNDENITLETVCHDPKLPYHDFILEDAASPKCIMKEKKKPGETFFMCSCSSDECNDNIIFSEEYNTSNPDLLLVIFQLVPVFCGLLVAKSLVLSALLVWWGDIWWKTMMELRSLDTQKATCHLQQVTDLPWTSVSSPVEREILYHTVARTKISDDDDEHTL

SEQ ID NO: 650 - protein, 232 aa, Artificial Sequence
  source: /note="Description of Artificial Sequence: Synthetic polypeptide"
MGRGLLRGLWPLHIVLWTRIASTIPPHVQKSVNNDMIVTDNNGAVKFPQLCKFCDVRFSTCDNQKSCMSNCSITSICEKPQEVCVAVWRKNDENITLETVCHDPKLPYHDFILEDAASPKCIMKEKKKPGETFFMCSCSSDECNDNIIFSEEYNTSNPDLLLVIFQAGTVLLLRAGFYAVSFLSVAVGSTVYYQGKCLTWKGPRRQLPAVVPAPLPPPCGSSAHLLPPVPGG

SEQ ID NO: 651 - protein, 210 aa, Artificial Sequence
  source: /note="Description of Artificial Sequence: Synthetic polypeptide"
TIPPHVQKSVNNDMIVTDNNGAVKFPQLCKFCDVRFSTCDNQKSCMSNCSITSICEKPQEVCVAVWRKNDENITLETVCHDPKLPYHDFILEDAASPKCIMKEKKKPGETFFMCSCSSDECNDNIIFSEEYNTSNPDLLLVIFQAGTVLLLRAGFYAVSFLSVAVGSTVYYQGKCLTWKGPRRQLPAVVPAPLPPPCGSSAHLLPPVPGG

SEQ ID NO: 652 - protein, 662 aa, Artificial Sequence
  source: /note="Description of Artificial Sequence: Synthetic polypeptide"
MGRGLLRGLWPLHIVLWTRIASTIPPHVQKSVNNDMIVTDNNGAVKFPQLCKFCDVRFSTCDNQKSCMSNCSITSICEKPQEVCVAVWRKNDENITLETVCHDPKLPYHDFILEDAASPKCIMKEKKKPGETFFMCSCSSDECNDNIIFSEEYNTSNPDLLLVIFQFWVLVVVGGVLACYSLLVTVAFIIFWVRSKRSRLLHSNKPITPSTYVRCLNVGLIRKLSDFIDPQEGWKKLAVAIKKPSGDDRYNQFHIRRFEALLQTGKSPTSELLFDWGTTNCTVGDLVDLLIQNEFFAPASLLLPDAVPKTANTLPSKEAITVQQKQMPFCDKDRTLMTPVQNLEQSYMPPDSSSPENKSLEVSDTRFHSFSFYELKNVTNNFDERPISVGGNKMGEGGFGVVYKGYVNNTTVAVKKLAAMVDITTEELKQQFDQEIKVMAKCQHENLVELLGFSSDGDDLCLVYVYMPNGSLLDRLSCLDGTPPLSWHMRCKIAQGAANGINFLHENHHIHRDIKSANILLDEAFTAKISDFGLARASEKFAQTVMTSRIVGTTAYMAPEALRGEITPKSDIYSFGVVLLEIITGLPAVDEHREPQLLLDIKEEIEDEEKTIEDYIDKKMNDADSTSVEAMYSVASQCLHEKKNKRPDIKKVQQLLQEMTAS

SEQ ID NO: 653 - protein, 640 aa, Artificial Sequence
  source: /note="Description of Artificial Sequence: Synthetic polypeptide"
TIPPHVQKSVNNDMIVTDNNGAVKFPQLCKFCDVRFSTCDNQKSCMSNCSITSICEKPQEVCVAVWRKNDENITLETVCHDPKLPYHDFILEDAASPKCIMKEKKKPGETFFMCSCSSDECNDNIIFSEEYNTSNPDLLLVIFQFWVLVVVGGVLACYSLLVTVAFIIFWVRSKRSRLLHSNKPITPSTYVRCLNVGLIRKLSDFIDPQEGWKKLAVAIKKPSGDDRYNQFHIRRFEALLQTGKSPTSELLFDWGTTNCTVGDLVDLLIQNEFFAPASLLLPDAVPKTANTLPSKEAITVQQKQMPFCDKDRTLMTPVQNLEQSYMPPDSSSPENKSLEVSDTRFHSFSFYELKNVTNNFDERPISVGGNKMGEGGFGVVYKGYVNNTTVAVKKLAAMVDITTEELKQQFDQEIKVMAKCQHENLVELLGFSSDGDDLCLVYVYMPNGSLLDRLSCLDGTPPLSWHMRCKIAQGAANGINFLHENHHIHRDIKSANILLDEAFTAKISDFGLARASEKFAQTVMTSRIVGTTAYMAPEALRGEITPKSDIYSFGVVLLEIITGLPAVDEHREPQLLLDIKEEIEDEEKTIEDYIDKKMNDADSTSVEAMYSVASQCLHEKKNKRPDIKKVQQLLQEMTAS

SEQ ID NO: 654 - protein, 374 aa, Artificial Sequence
  source: /note="Description of Artificial Sequence: Synthetic polypeptide"
MGRGLLRGLWPLHIVLWTRIASTIPPHVQKSVNNDMIVTDNNGAVKFPQLCKFCDVRFSTCDNQKSCMSNCSITSICEKPQEVCVAVWRKNDENITLETVCHDPKLPYHDFILEDAASPKCIMKEKKKPGETFFMCSCSSDECNDNIIFSEEYNTSNPDLLLVIFQTIIGVSVLSVLVVSVVAVLVYKFYFHLMLLAGCIKYGRGENIYDAFVIYSSQDEDWVRNELVKNLEEGVPPFQLCLHYRDFIPGVAIAANIIHEGFHKSRKVIVVVSQHFIQSRWCIFEYEIAQTWQFLSSRAGIIFIVLQKVEKTLLRQQVELYRLLSRNTYLEWEDSVLGRHIFWRRLRKALLDGKSWNPEGTVGTGCNWQEATSI

SEQ ID NO: 655 - protein, 352 aa, Artificial Sequence
  source: /note="Description of Artificial Sequence: Synthetic polypeptide"
TIPPHVQKSVNNDMIVTDNNGAVKFPQLCKFCDVRFSTCDNQKSCMSNCSITSICEKPQEVCVAVWRKNDENITLETVCHDPKLPYHDFILEDAASPKCIMKEKKKPGETFFMCSCSSDECNDNIIFSEEYNTSNPDLLLVIFQTIIGVSVLSVLVVSVVAVLVYKFYFHLMLLAGCIKYGRGENIYDAFVIYSSQDEDWVRNELVKNLEEGVPPFQLCLHYRDFIPGVAIAANIIHEGFHKSRKVIVVVSQHFIQSRWCIFEYEIAQTWQFLSSRAGIIFIVLQKVEKTLLRQQVELYRLLSRNTYLEWEDSVLGRHIFWRRLRKALLDGKSWNPEGTVGTGCNWQEATSI

SEQ ID NO: 656 - protein, 384 aa, Artificial Sequence
  source: /note="Description of Artificial Sequence: Synthetic polypeptide"
MGRGLLRGLWPLHIVLWTRIASTIPPHVQKSVNNDMIVTDNNGAVKFPQLCKFCDVRFSTCDNQKSCMSNCSITSICEKPQEVCVAVWRKNDENITLETVCHDPKLPYHDFILEDAASPKCIMKEKKKPGETFFMCSCSSDECNDNIIFSEEYNTSNPDLLLVIFQMFWVQVLLAGLVVPLLLGATLTYTYRHCWPHKPLVTADEAGMEALTPPPATHLSPLDSAHTLLAPPDSSEKICTVQLVGNSWTPGYPETQEALCPQVTWSWDQLPSRALGPAAAPTLSPESPAGSPAMMLQPGPQLYDVMDAVPARRWKEFVRTLGLREAEIEAVEVEIGRFRDQQYEMLKRWRQQQPAGLGAVYAALERMGLDGCVEDLRSRLQRGP

SEQ ID NO: 657 - protein, 362 aa, Artificial Sequence
  source: /note="Description of Artificial Sequence: Synthetic polypeptide"
TIPPHVQKSVNNDMIVTDNNGAVKFPQLCKFCDVRFSTCDNQKSCMSNCSITSICEKPQEVCVAVWRKNDENITLETVCHDPKLPYHDFILEDAASPKCIMKEKKKPGETFFMCSCSSDECNDNIIFSEEYNTSNPDLLLVIFQMFWVQVLLAGLVVPLLLGATLTYTYRHCWPHKPLVTADEAGMEALTPPPATHLSPLDSAHTLLAPPDSSEKICTVQLVGNSWTPGYPETQEALCPQVTWSWDQLPSRALGPAAAPTLSPESPAGSPAMMLQPGPQLYDVMDAVPARRWKEFVRTLGLREAEIEAVEVEIGRFRDQQYEMLKRWRQQQPAGLGAVYAALERMGLDGCVEDLRSRLQRGP

SEQ ID NO: 658 - protein, 837 aa, Artificial Sequence
  source: /note="Description of Artificial Sequence: Synthetic polypeptide"
MGRGLLRGLWPLHIVLWTRIASTIPPHVQKSVNNDMIVTDNNGAVKFPQLCKFCDVRFSTCDNQKSCMSNCSITSICEKPQEVCVAVWRKNDENITLETVCHDPKLPYHDFILEDAASPKCIMKEKKKPGETFFMCSCSSDECNDNIIFSEEYNTSNPDLLLVIFQFWVLVVVGGVLACYSLLVTVAFIIFWVRSKRSRLLHSASSGMADSANHLPFFFGNITREEAEDYLVQGGMSDGLYLLRQSRNYLGGFALSVAHGRKAHHYTIERELNGTYAIAGGRTHASPADLCHYHSQESDGLVCLLKKPFNRPQGVQPKTGPFEDLKENLIREYVKQTWNLQGQALEQAIISQKPQLEKLIATTAHEKMPWFHGKISREESEQIVLIGSKTNGKFLIRARDNNGSYALCLLHEGKVLHYRIDKDKTGKLSIPEGKKFDTLWQLVEHYSYKADGLLRVLTVPCQKIGTQGNVNFGGRPQLPGSHPATWSAGGIISRIKSYSFPKPGHRKSSPAQGNRQESTVSFNPYEPELAPWAADKGPQREALPMDTEVYESPYADPEEIRPKEVYLDRKLLTLEDKELGSGNFGTVKKGYYQMKKVVKTVAVKILKNEANDPALKDELLAEANVMQQLDNPYIVRMIGICEAESWMLVMEMAELGPLNKYLQQNRHVKDKNIIELVHQVSMGMKYLEESNFVHRDLAARNVLLVTQHYAKISDFGLSKALRADENYYKAQTHGKWPVKWYAPECINYYKFSSKSDVWSFGVLMWEAFSYGQKPYRGMKGSEVTAMLEKGERMGCPAGCPREMYDLMNLCWTYDVENRPGFAAVELRLRNYYYDVVN

SEQ ID NO: 659 - protein, 815 aa, Artificial Sequence
  source: /note="Description of Artificial Sequence: Synthetic polypeptide"
TIPPHVQKSVNNDMIVTDNNGAVKFPQLCKFCDVRFSTCDNQKSCMSNCSITSICEKPQEVCVAVWRKNDENITLETVCHDPKLPYHDFILEDAASPKCIMKEKKKPGETFFMCSCSSDECNDNIIFSEEYNTSNPDLLLVIFQFWVLVVVGGVLACYSLLVTVAFIIFWVRSKRSRLLHSASSGMADSANHLPFFFGNITREEAEDYLVQGGMSDGLYLLRQSRNYLGGFALSVAHGRKAHHYTIERELNGTYAIAGGRTHASPADLCHYHSQESDGLVCLLKKPFNRPQGVQPKTGPFEDLKENLIREYVKQTWNLQGQALEQAIISQKPQLEKLIATTAHEKMPWFHGKISREESEQIVLIGSKTNGKFLIRARDNNGSYALCLLHEGKVLHYRIDKDKTGKLSIPEGKKFDTLWQLVEHYSYKADGLLRVLTVPCQKIGTQGNVNFGGRPQLPGSHPATWSAGGIISRIKSYSFPKPGHRKSSPAQGNRQESTVSFNPYEPELAPWAADKGPQREALPMDTEVYESPYADPEEIRPKEVYLDRKLLTLEDKELGSGNFGTVKKGYYQMKKVVKTVAVKILKNEANDPALKDELLAEANVMQQLDNPYIVRMIGICEAESWMLVMEMAELGPLNKYLQQNRHVKDKNIIELVHQVSMGMKYLEESNFVHRDLAARNVLLVTQHYAKISDFGLSKALRADENYYKAQTHGKWPVKWYAPECINYYKFSSKSDVWSFGVLMWEAFSYGQKPYRGMKGSEVTAMLEKGERMGCPAGCPREMYDLMNLCWTYDVENRPGFAAVELRLRNYYYDVVN

SEQ ID NO: 660 - protein, 714 aa, Artificial Sequence
  source: /note="Description of Artificial Sequence: Synthetic polypeptide"
MGRGLLRGLWPLHIVLWTRIASTIPPHVQKSVNNDMIVTDNNGAVKFPQLCKFCDVRFSTCDNQKSCMSNCSITSICEKPQEVCVAVWRKNDENITLETVCHDPKLPYHDFILEDAASPKCIMKEKKKPGETFFMCSCSSDECNDNIIFSEEYNTSNPDLLLVIFQFWVLVVVGGVLACYSLLVTVAFIIFWVRSKRSRLLHSGCIKSKGKDSLSDDGVDLKTQPVRNTERTIYVRDPTSNKQQRPVPESQLLPGQRFQTKDPEEQGDIVVALYPYDGIHPDDLSFKKGEKMKVLEEHGEWWKAKSLLTKKEGFIPSNYVAKLNTLETEEWFFKDITRKDAERQLLAPGNSAGAFLIRESETLKGSFSLSVRDFDPVHGDVIKHYKIRSLDNGGYYISPRITFPCISDMIKHYQKQADGLCRRLEKACISPKPQKPWDKDAWEIPRESIKLVKRLGAGQFGEVWMGYYNNSTKVAVKTLKPGTMSVQAFLEEANLMKTLQHDKLVRLYAVVTREEPIYIITEYMAKGSLLDFLKSDEGGKVLLPKLIDFSAQIAEGMAYIERKNYIHRDLRAANVLVSESLMCKIADFGLARVIEDNEYTAREGAKFPIKWTAPEAINFGCFTIKSDVWSFGILLYEIVTYGKIPYPGRTNADVMTALSQGYRMPRVENCPDELYDIMKMCWKEKAEERPTFDYLQSVLDDFYTATEGQYQQQP

SEQ ID NO: 661 - protein, 692 aa, Artificial Sequence
  source: /note="Description of Artificial Sequence: Synthetic polypeptide"
TIPPHVQKSVNNDMIVTDNNGAVKFPQLCKFCDVRFSTCDNQKSCMSNCSITSICEKPQEVCVAVWRKNDENITLETVCHDPKLPYHDFILEDAASPKCIMKEKKKPGETFFMCSCSSDECNDNIIFSEEYNTSNPDLLLVIFQFWVLVVVGGVLACYSLLVTVAFIIFWVRSKRSRLLHSGCIKSKGKDSLSDDGVDLKTQPVRNTERTIYVRDPTSNKQQRPVPESQLLPGQRFQTKDPEEQGDIVVALYPYDGIHPDDLSFKKGEKMKVLEEHGEWWKAKSLLTKKEGFIPSNYVAKLNTLETEEWFFKDITRKDAERQLLAPGNSAGAFLIRESETLKGSFSLSVRDFDPVHGDVIKHYKIRSLDNGGYYISPRITFPCISDMIKHYQKQADGLCRRLEKACISPKPQKPWDKDAWEIPRESIKLVKRLGAGQFGEVWMGYYNNSTKVAVKTLKPGTMSVQAFLEEANLMKTLQHDKLVRLYAVVTREEPIYIITEYMAKGSLLDFLKSDEGGKVLLPKLIDFSAQIAEGMAYIERKNYIHRDLRAANVLVSESLMCKIADFGLARVIEDNEYTAREGAKFPIKWTAPEAINFGCFTIKSDVWSFGILLYEIVTYGKIPYPGRTNADVMTALSQGYRMPRVENCPDELYDIMKMCWKEKAEERPTFDYLQSVLDDFYTATEGQYQQQP

SEQ ID NO: 662 - protein, 745 aa, Artificial Sequence
  source: /note="Description of Artificial Sequence: Synthetic polypeptide"
MGRGLLRGLWPLHIVLWTRIASTIPPHVQKSVNNDMIVTDNNGAVKFPQLCKFCDVRFSTCDNQKSCMSNCSITSICEKPQEVCVAVWRKNDENITLETVCHDPKLPYHDFILEDAASPKCIMKEKKKPGETFFMCSCSSDECNDNIIFSEEYNTSNPDLLLVIFQFWVLVVVGGVLACYSLLVTVAFIIFWVRSKRSRLLHSGCIKSKENKSPAIKYRPENTPEPVSTSVSHYGAEPTTVSPCPSSSAKGTAVNFSSLSMTPFGGSSGVTPFGGASSSFSVVPSSYPAGLTGGVTIFVALYDYEARTTEDLSFKKGERFQIINNTEGDWWEARSIATGKNGYIPSNYVAPADSIQAEEWYFGKMGRKDAERLLLNPGNQRGIFLVRESETTKGAYSLSIRDWDEIRGDNVKHYKIRKLDNGGYYITTRAQFDTLQKLVKHYTEHADGLCHKLTTVCPTVKPQTQGLAKDAWEIPRESLRLEVKLGQGCFGEVWMGTWNGTTKVAIKTLKPGTMMPEAFLQEAQIMKKLRHDKLVPLYAVVSEEPIYIVTEFMSKGSLLDFLKEGDGKYLKLPQLVDMAAQIADGMAYIERMNYIHRDLRAANILVGENLVCKIADFGLARLIEDNEYTARQGAKFPIKWTAPEAALYGRFTIKSDVWSFGILQTELVTKGRVPYPGMVNREVLEQVERGYRMPCPQGCPESLHELMNLCWKKDPDERPTFEYIQSFLEDYFTATEPQYQPGENL

SEQ ID NO: 663 - protein, 723 aa, Artificial Sequence
  source: /note="Description of Artificial Sequence: Synthetic polypeptide"
TIPPHVQKSVNNDMIVTDNNGAVKFPQLCKFCDVRFSTCDNQKSCMSNCSITSICEKPQEVCVAVWRKNDENITLETVCHDPKLPYHDFILEDAASPKCIMKEKKKPGETFFMCSCSSDECNDNIIFSEEYNTSNPDLLLVIFQFWVLVVVGGVLACYSLLVTVAFIIFWVRSKRSRLLHSGCIKSKENKSPAIKYRPENTPEPVSTSVSHYGAEPTTVSPCPSSSAKGTAVNFSSLSMTPFGGSSGVTPFGGASSSFSVVPSSYPAGLTGGVTIFVALYDYEARTTEDLSFKKGERFQIINNTEGDWWEARSIATGKNGYIPSNYVAPADSIQAEEWYFGKMGRKDAERLLLNPGNQRGIFLVRESETTKGAYSLSIRDWDEIRGDNVKHYKIRKLDNGGYYITTRAQFDTLQKLVKHYTEHADGLCHKLTTVCPTVKPQTQGLAKDAWEIPRESLRLEVKLGQGCFGEVWMGTWNGTTKVAIKTLKPGTMMPEAFLQEAQIMKKLRHDKLVPLYAVVSEEPIYIVTEFMSKGSLLDFLKEGDGKYLKLPQLVDMAAQIADGMAYIERMNYIHRDLRAANILVGENLVCKIADFGLARLIEDNEYTARQGAKFPIKWTAPEAALYGRFTIKSDVWSFGILQTELVTKGRVPYPGMVNREVLEQVERGYRMPCPQGCPESLHELMNLCWKKDPDERPTFEYIQSFLEDYFTATEPQYQPGENL

SEQ ID NO: 664 - protein, 731 aa, Artificial Sequence
  source: /note="Description of Artificial Sequence: Synthetic polypeptide"
MGRGLLRGLWPLHIVLWTRIASTIPPHVQKSVNNDMIVTDNNGAVKFPQLCKFCDVRFSTCDNQKSCMSNCSITSICEKPQEVCVAVWRKNDENITLETVCHDPKLPYHDFILEDAASPKCIMKEKKKPGETFFMCSCSSDECNDNIIFSEEYNTSNPDLLLVIFQFWVLVVVGGVLACYSLLVTVAFIIFWVRSKRSRLLHSGCVFCKKLEPVATAKEDAGLEGDFRSYGAADHYGPDPTKARPASSFAHIPNYSNFSSQAINPGFLDSGTIRGVSGIGVTLFIALYDYEARTEDDLTFTKGEKFHILNNTEGDWWEARSLSSGKTGCIPSNYVAPVDSIQAEEWYFGKIGRKDAERQLLSPGNPQGAFLIRESETTKGAYSLSIRDWDQTRGDHVKHYKIRKLDMGGYYITTRVQFNSVQELVQHYMEVNDGLCNLLIAPCTIMKPQTLGLAKDAWEISRSSITLERRLGTGCFGDVWLGTWNGSTKVAVKTLKPGTMSPKAFLEEAQVMKLLRHDKLVQLYAVVSEEPIYIVTEFMCHGSLLDFLKNPEGQDLRLPQLVDMAAQVAEGMAYMERMNYIHRDLRAANILVGERLACKIADFGLARLIKDDEYNPCQGSKFPIKWTAPEAALFGRFTIKSDVWSFGILLTELITKGRIPYPGMNKREVLEQVEQGYHMPCPPGCPASLYEAMEQTWRLDPEERPTFEYLQSFLEDYFTSAEPQYQPGDQT

SEQ ID NO: 665 - protein, 709 aa, Artificial Sequence
  source: /note="Description of Artificial Sequence: Synthetic polypeptide"
TIPPHVQKSVNNDMIVTDNNGAVKFPQLCKFCDVRFSTCDNQKSCMSNCSITSICEKPQEVCVAVWRKNDENITLETVCHDPKLPYHDFILEDAASPKCIMKEKKKPGETFFMCSCSSDECNDNIIFSEEYNTSNPDLLLVIFQFWVLVVVGGVLACYSLLVTVAFIIFWVRSKRSRLLHSGCVFCKKLEPVATAKEDAGLEGDFRSYGAADHYGPDPTKARPASSFAHIPNYSNFSSQAINPGFLDSGTIRGVSGIGVTLFIALYDYEARTEDDLTFTKGEKFHILNNTEGDWWEARSLSSGKTGCIPSNYVAPVDSIQAEEWYFGKIGRKDAERQLLSPGNPQGAFLIRESETTKGAYSLSIRDWDQTRGDHVKHYKIRKLDMGGYYITTRVQFNSVQELVQHYMEVNDGLCNLLIAPCTIMKPQTLGLAKDAWEISRSSITLERRLGTGCFGDVWLGTWNGSTKVAVKTLKPGTMSPKAFLEEAQVMKLLRHDKLVQLYAVVSEEPIYIVTEFMCHGSLLDFLKNPEGQDLRLPQLVDMAAQVAEGMAYMERMNYIHRDLRAANILVGERLACKIADFGLARLIKDDEYNPCQGSKFPIKWTAPEAALFGRFTIKSDVWSFGILLTELITKGRIPYPGMNKREVLEQVEQGYHMPCPPGCPASLYEAMEQTWRLDPEERPTFEYLQSFLEDYFTSAEPQYQPGDQT

SEQ ID NO: 666 - protein, 236 aa, Artificial Sequence
  source: /note="Description of Artificial Sequence: Synthetic polypeptide"
MGRGLLRGLWPLHIVLWTRIASTIPPHVQKSVNNDMIVTDNNGAVKFPQLCKFCDVRFSTCDNQKSCMSNCSITSICEKPQEVCVAVWRKNDENITLETVCHDPKLPYHDFILEDAASPKCIMKEKKKPGETFFMCSCSSDECNDNIIFSEEYNTSNPDLLLVIFQFWVLVVVGGVLACYSLLVTVAFIIFWVRKRGRKKLLYIFKQPFMRPVQTTQEEDGCSCRFPEEEEGGCEL

SEQ ID NO: 667 - protein, 214 aa, Artificial Sequence
  source: /note="Description of Artificial Sequence: Synthetic polypeptide"
TIPPHVQKSVNNDMIVTDNNGAVKFPQLCKFCDVRFSTCDNQKSCMSNCSITSICEKPQEVCVAVWRKNDENITLETVCHDPKLPYHDFILEDAASPKCIMKEKKKPGETFFMCSCSSDECNDNIIFSEEYNTSNPDLLLVIFQFWVLVVVGGVLACYSLLVTVAFIIFWVRKRGRKKLLYIFKQPFMRPVQTTQEEDGCSCRFPEEEEGGCEL

SEQ ID NO: 668 - protein, 217 aa, Artificial Sequence
  source: /note="Description of Artificial Sequence: Synthetic polypeptide"
MGRGLLRGLWPLHIVLWTRIASTIPPHVQKSVNNDMIVTDNNGAVKFPQLCKFCDVRFSTCDNQKSCMSNCSITSICEKPQEVCVAVWRKNDENITLETVCHDPKLPYHDFILEDAASPKCIMKEKKKPGETFFMCSCSSDECNDNIIFSEEYNTSNPDLLLVIFQFWVLVVVGGVLACYSLLVTVAFIIFWVLCARPRRSPAQEDGKVYINMPGRG

SEQ ID NO: 669 - protein, 195 aa, Artificial Sequence
  source: /note="Description of Artificial Sequence: Synthetic polypeptide"
TIPPHVQKSVNNDMIVTDNNGAVKFPQLCKFCDVRFSTCDNQKSCMSNCSITSICEKPQEVCVAVWRKNDENITLETVCHDPKLPYHDFILEDAASPKCIMKEKKKPGETFFMCSCSSDECNDNIIFSEEYNTSNPDLLLVIFQFWVLVVVGGVLACYSLLVTVAFIIFWVLCARPRRSPAQEDGKVYINMPGRG

SEQ ID NO: 670 - protein, 234 aa, Artificial Sequence
  source: /note="Description of Artificial Sequence: Synthetic polypeptide"
MGRGLLRGLWPLHIVLWTRIASTIPPHVQKSVNNDMIVTDNNGAVKFPQLCKFCDVRFSTCDNQKSCMSNCSITSICEKPQEVCVAVWRKNDENITLETVCHDPKLPYHDFILEDAASPKCIMKEKKKPGETFFMCSCSSDECNDNIIFSEEYNTSNPDLLLVIFQFWVLVVVGGVLACYSLLVTVAFIIFWVRSKRSRLLHSDYMNMTPRRPGPTRKHYQPYAPPRDFAAYRS

SEQ ID NO: 671 - protein, 212 aa, Artificial Sequence
  source: /note="Description of Artificial Sequence: Synthetic polypeptide"
TIPPHVQKSVNNDMIVTDNNGAVKFPQLCKFCDVRFSTCDNQKSCMSNCSITSICEKPQEVCVAVWRKNDENITLETVCHDPKLPYHDFILEDAASPKCIMKEKKKPGETFFMCSCSSDECNDNIIFSEEYNTSNPDLLLVIFQFWVLVVVGGVLACYSLLVTVAFIIFWVRSKRSRLLHSDYMNMTPRRPGPTRKHYQPYAPPRDFAAYRS

SEQ ID NO: 672 - protein, 305 aa, Artificial Sequence
  source: /note="Description of Artificial Sequence: Synthetic polypeptide"
MGRGLLRGLWPLHIVLWTRIASTIPPHVQKSVNNDMIVTDNNGAVKFPQLCKFCDVRFSTCDNQKSCMSNCSITSICEKPQEVCVAVWRKNDENITLETVCHDPKLPYHDFILEDAASPKCIMKEKKKPGETFFMCSCSSDECNDNIIFSEEYNTSNPDLLLVIFQFWVLVVVGGVLACYSLLVTVAFIIFWVRVKFSRSADAPAYQQGQNQLYNELNLGRREEYDVLDKRRGRDPEMGGKPRRKNPQEGLYNELQKDKMAEAYSEIGMKGERRRGKGHDGLYQGLSTATKDTYDALHMQALPPR

SEQ ID NO: 673 - protein, 283 aa, Artificial Sequence
  source: /note="Description of Artificial Sequence: Synthetic polypeptide"
TIPPHVQKSVNNDMIVTDNNGAVKFPQLCKFCDVRFSTCDNQKSCMSNCSITSICEKPQEVCVAVWRKNDENITLETVCHDPKLPYHDFILEDAASPKCIMKEKKKPGETFFMCSCSSDECNDNIIFSEEYNTSNPDLLLVIFQFWVLVVVGGVLACYSLLVTVAFIIFWVRVKFSRSADAPAYQQGQNQLYNELNLGRREEYDVLDKRRGRDPEMGGKPRRKNPQEGLYNELQKDKMAEAYSEIGMKGERRRGKGHDGLYQGLSTATKDTYDALHMQALPPR

SEQ ID NO: 674 - protein, 199 aa, Artificial Sequence
  source: /note="Description of Artificial Sequence: Synthetic polypeptide"
MGRGLLRGLWPLHIVLWTRIASTIPPHVQKSVNNDMIVTDNNGAVKFPQLCKFCDVRFSTCDNQKSCMSNCSITSICEKPQEVCVAVWRKNDENITLETVCHDPKLPYHDFILEDAASPKCIMKEKKKPGETFFMCSCSSDECNDNIIFSEEYNTSNPDLLLVIFQVTGISLLPPLGVAISVIIIFYCYRVNRQQKLSS

SEQ ID NO: 675 - protein, 177 aa, Artificial Sequence
  source: /note="Description of Artificial Sequence: Synthetic polypeptide"
TIPPHVQKSVNNDMIVTDNNGAVKFPQLCKFCDVRFSTCDNQKSCMSNCSITSICEKPQEVCVAVWRKNDENITLETVCHDPKLPYHDFILEDAASPKCIMKEKKKPGETFFMCSCSSDECNDNIIFSEEYNTSNPDLLLVIFQVTGISLLPPLGVAISVIIIFYCYRVNRQQKLSS

SEQ ID NO: 676 - protein, 21 aa, Artificial Sequence
  source: /note="Description of Artificial Sequence: Synthetic peptide"
MALPVTALLLPLALLLHAARP

SEQ ID NO: 677 - protein, 231 aa, Artificial Sequence
  source: /note="Description of Artificial Sequence: Synthetic polypeptide"
MSKQRGTFSEVSLAQDPKRQQRKPKGNKSSISGTEQEIFQVELNLQNPSLNHQGIDKIYDCQGLLPPPEKLTAEVLGIICIVLMATVLKTIVLIPFLEQNNSSPNTRTQKARHCGHCPEEWITYSNSCYYIGKERRTWEESLLACTSKNSSLLSIDNEEEMKFLSIISPSSWIGVFRNSSHHPWVTMNGLAFKHEIKDSDNAELNCAVLQVNRLKSAQCGSSIIYHCKHKL

SEQ ID NO: 678 - protein, 391 aa, Artificial Sequence
  source: /note="Description of Artificial Sequence: Synthetic polypeptide"
MLGIWTLLPLVLTSVARLSSKSVNAQVTDINSKGLELRKTVTTVETQNLEGLHHDGQFCHKPCPPGERKARDCTVNGDEPDCVPCQEGKEYTDKAHFSSKCRRCRLCDEGHGLEVEINCTRTQNTKCRCKPNFFCNSTVCEHCDPCTKCEHGIIKECTLTSNTKCKEEGSRSNMFWVQVLLAGLVVPLLLGATLTYTYRHCWPHKPLVTADEAGMEALTPPPATHLSPLDSAHTLLAPPDSSEKICTVQLVGNSWTPGYPETQEALCPQVTWSWDQLPSRALGPAAAPTLSPESPAGSPAMMLQPGPQLYDVMDAVPARRWKEFVRTLGLREAEIEAVEVEIGRFRDQQYEMLKRWRQQQPAGLGAVYAALERMGLDGCVEDLRSRLQRGP

SEQ ID NO: 679 - protein, 366 aa, Artificial Sequence
  source: /note="Description of Artificial Sequence: Synthetic polypeptide"
QVTDINSKGLELRKTVTTVETQNLEGLHHDGQFCHKPCPPGERKARDCTVNGDEPDCVPCQEGKEYTDKAHFSSKCRRCRLCDEGHGLEVEINCTRTQNTKCRCKPNFFCNSTVCEHCDPCTKCEHGIIKECTLTSNTKCKEEGSRSNMFWVQVLLAGLVVPLLLGATLTYTYRHCWPHKPLVTADEAGMEALTPPPATHLSPLDSAHTLLAPPDSSEKICTVQLVGNSWTPGYPETQEALCPQVTWSWDQLPSRALGPAAAPTLSPESPAGSPAMMLQPGPQLYDVMDAVPARRWKEFVRTLGLREAEIEAVEVEIGRFRDQQYEMLKRWRQQQPAGLGAVYAALERMGLDGCVEDLRSRLQRGP

SEQ ID NO: 680 - protein, 472 aa, Artificial Sequence
  source: /note="Description of Artificial Sequence: Synthetic polypeptide"
MGRGLLRGLWPLHIVLWTRIASTIPPHVQKSVNNDMIVTDNNGAVKFPQLCKFCDVRFSTCDNQKSCMSNCSITSICEKPQEVCVAVWRKNDENITLETVCHDPKLPYHDFILEDAASPKCIMKEKKKPGETFFMCSCSSDECNDNIIFSEEYNTSNPDLLLVIFQVTGISLLPPLGVAISVIIIFYSLKTHPLWRLWKKIWAVPSPERFFMPLYKGCSGDFKKWVGAPFTGSSLELGPWSPEVPSTLEVYSCHPPRSPAKRLQLTELQEPAELVESDGVPKPSFWPTAQNSGGSAYSEERDRPYGLVSIDTVTVLDAEGPCTWPCSCEDDGYPALDLDAGLEPSPGLEDPLLDAGTTVLSCGCVSAGSPGLGGPLGSLLDRLKPPLADGEDWAGGLPWGGRSPGGVSESEAGSPLAGLDMDTFDSGFVGSDCSSPVECDFTSPGDEGPPRSYLRQWVVIPPPLSSPGPQAS

SEQ ID NO: 681 - protein, 450 aa, Artificial Sequence
  source: /note="Description of Artificial Sequence: Synthetic polypeptide"
TIPPHVQKSVNNDMIVTDNNGAVKFPQLCKFCDVRFSTCDNQKSCMSNCSITSICEKPQEVCVAVWRKNDENITLETVCHDPKLPYHDFILEDAASPKCIMKEKKKPGETFFMCSCSSDECNDNIIFSEEYNTSNPDLLLVIFQVTGISLLPPLGVAISVIIIFYSLKTHPLWRLWKKIWAVPSPERFFMPLYKGCSGDFKKWVGAPFTGSSLELGPWSPEVPSTLEVYSCHPPRSPAKRLQLTELQEPAELVESDGVPKPSFWPTAQNSGGSAYSEERDRPYGLVSIDTVTVLDAEGPCTWPCSCEDDGYPALDLDAGLEPSPGLEDPLLDAGTTVLSCGCVSAGSPGLGGPLGSLLDRLKPPLADGEDWAGGLPWGGRSPGGVSESEAGSPLAGLDMDTFDSGFVGSDCSSPVECDFTSPGDEGPPRSYLRQWVVIPPPLSSPGPQAS

SEQ ID NO: 682 - protein, 272 aa, Artificial Sequence
  source: /note="Description of Artificial Sequence: Synthetic polypeptide"
MALPVTALLLPLALLLHAARPTIPPHVQKSVNNDMIVTDNNGAVKFPQLCKFCDVRFSTCDNQKSCMSNCSITSICEKPQEVCVAVWRKNDENITLETVCHDPKLPYHDFILEDAASPKCIMKEKKKPGETFFMCSCSSDECNDNIIFSEEYNTSNPDLLLVIFQVVISVGSMGLIISLLCVYFWLERTMPRIPTLKNLEDLVTEYHGNFSAWSGVSKGLAESLQPDYSERLCLVSEIPPKGGALGEGPGASPCNQHSPYWAPPCYTLKPET

SEQ ID NO: 683 - protein, 251 aa, Artificial Sequence
  source: /note="Description of Artificial Sequence: Synthetic polypeptide"
TIPPHVQKSVNNDMIVTDNNGAVKFPQLCKFCDVRFSTCDNQKSCMSNCSITSICEKPQEVCVAVWRKNDENITLETVCHDPKLPYHDFILEDAASPKCIMKEKKKPGETFFMCSCSSDECNDNIIFSEEYNTSNPDLLLVIFQVVISVGSMGLIISLLCVYFWLERTMPRIPTLKNLEDLVTEYHGNFSAWSGVSKGLAESLQPDYSERLCLVSEIPPKGGALGEGPGASPCNQHSPYWAPPCYTLKPET

SEQ ID NO: 684 - protein, 221 aa, Artificial Sequence
  source: /note="Description of Artificial Sequence: Synthetic polypeptide"
MALPVTALLLPLALLLHAARPLQCFCHLCTKDNFTCVTDGLCFVSVTETTDKVIHNSMCIAEIDLIPRDRPFVCAPSSKTGSVTTTYCCNQDHCNKIELPTTVKSSPGLGPVELVVISVGSMGLIISLLCVYFWLERTMPRIPTLKNLEDLVTEYHGNFSAWSGVSKGLAESLQPDYSERLCLVSEIPPKGGALGEGPGASPCNQHSPYWAPPCYTLKPET

SEQ ID NO: 685 - protein, 200 aa, Artificial Sequence
  source: /note="Description of Artificial Sequence: Synthetic polypeptide"
LQCFCHLCTKDNFTCVTDGLCFVSVTETTDKVIHNSMCIAEIDLIPRDRPFVCAPSSKTGSVTTTYCCNQDHCNKIELPTTVKSSPGLGPVELVVISVGSMGLIISLLCVYFWLERTMPRIPTLKNLEDLVTEYHGNFSAWSGVSKGLAESLQPDYSERLCLVSEIPPKGGALGEGPGASPCNQHSPYWAPPCYTLKPET

SEQ ID NO: 686 - protein, 432 aa, Artificial Sequence
  source: /note="Description of Artificial Sequence: Synthetic polypeptide"
MEAAVAAPRPRLLLLVLAAAAAAAAALLPGATALQCFCHLCTKDNFTCVTDGLCFVSVTETTDKVIHNSMCIAEIDLIPRDRPFVCAPSSKTGSVTTTYCCNQDHCNKIELPTTVKSSPGLGPVELAAVIAGPVCFVCISLMLMVYISLKTHPLWRLWKKIWAVPSPERFFMPLYKGCSGDFKKWVGAPFTGSSLELGPWSPEVPSTLEVYSCHPPRSPAKRLQLTELQEPAELVESDGVPKPSFWPTAQNSGGSAYSEERDRPYGLVSIDTVTVLDAEGPCTWPCSCEDDGYPALDLDAGLEPSPGLEDPLLDAGTTVLSCGCVSAGSPGLGGPLGSLLDRLKPPLADGEDWAGGLPWGGRSPGGVSESEAGSPLAGLDMDTFDSGFVGSDCSSPVECDFTSPGDEGPPRSYLRQWVVIPPPLSSPGPQAS

SEQ ID NO: 687 - protein, 399 aa, Artificial Sequence
  source: /note="Description of Artificial Sequence: Synthetic polypeptide"
LQCFCHLCTKDNFTCVTDGLCFVSVTETTDKVIHNSMCIAEIDLIPRDRPFVCAPSSKTGSVTTTYCCNQDHCNKIELPTTVKSSPGLGPVELAAVIAGPVCFVCISLMLMVYISLKTHPLWRLWKKIWAVPSPERFFMPLYKGCSGDFKKWVGAPFTGSSLELGPWSPEVPSTLEVYSCHPPRSPAKRLQLTELQEPAELVESDGVPKPSFWPTAQNSGGSAYSEERDRPYGLVSIDTVTVLDAEGPCTWPCSCEDDGYPALDLDAGLEPSPGLEDPLLDAGTTVLSCGCVSAGSPGLGGPLGSLLDRLKPPLADGEDWAGGLPWGGRSPGGVSESEAGSPLAGLDMDTFDSGFVGSDCSSPVECDFTSPGDEGPPRSYLRQWVVIPPPLSSPGPQAS
